(19) United States
(12) Patent Application Publication
(10) Pub. No.: US 2023/0212610 A1
(43) Pub. Date: Jul. 6, 2023

(54) NUCLEIC ACID EXPRESSION USING SUBCUTANEOUS ADMINISTRATION

(71) Applicant: DNARx, San Francisco, CA (US)

(72) Inventors: Robert DEBS, San Francisco, CA (US); Chakkrapong HANDUMRONGKUL, Richmond, VA (US); Timothy HEATH, Madison, WI (US); Alice YE, San Francisco, CA (US); Ryan ICE, Richmond, CA (US); Marissa MACK, Richmond, VA (US)

(73) Assignee: DNARx, San Francisco, CA (US)

(21) Appl. No.: 18/068,351

(22) Filed: Dec. 19, 2022

Related U.S. Application Data
(60) Provisional application No. 63/291,727, filed on Dec. 20, 2021.

(51) Int. Cl. C12N 15/86; A61K 47/69

(52) U.S. Cl. CPC C12N 15/86; A61K 47/6911

(57) ABSTRACT

Provided herein are compositions, systems, kits, and methods for treating a subject, and/or a subject's pre-adipocytes and/or adipocytes, with a composition containing a nucleic acid sequence encoding a protein or other biologically active nucleic acid-encoded molecule (BANEM), or a vector containing the nucleic acid sequence, wherein the treating comprises: a) injecting the composition into one or more subcutaneous (SC) regions of the subject such that one or more protein, or other BANEM, is detectable in a blood, serum, or plasma sample from the subject; and/or b) injecting the composition into one or more SC regions of the subject such that in-vivo transfected pre-adipocytes and/or adipocytes (e.g., transfected cells of fat cell origin) are generated; and/or c) performing the following: i) contacting pre-adipocytes and/or adipocytes (e.g., cells of fat cell origin) from the subject ex-vivo with the composition such that ex-vivo transfected pre-adipocytes and/or adipocytes are generated, and ii) injecting the ex-vivo transfected pre-adipocytes and/or adipocytes into one or more SC regions of the subject.

### CROSS-REFERENCE TO RELATED APPLICATIONS

[0001] This application claims priority to U.S. Provisional Application No. 63/291,727, filed on Dec. 20, 2021, the entirely of which is incorporated herein by reference.

### REFERENCE TO SEQUENCE LISTING SUBMITTED ELECTRONICALLY

[0002] This application contains a computer readable Sequence Listing which has been submitted in XML file format via Patent Center, the entire content of which is incorporated by reference herein in its entirety. The Sequence Listing XML file submitted via Patent Center is entitled “14755-007-999_SEQ_LISTING.xml”, was created on Dec. 17, 2022, and is 3,985,876 bytes in size.

### FIELD

[0003] Provided herein are compositions, systems, kits, and methods for treating a subject, and/or a subject's pre-adipocytes and/or adipocytes, with a composition containing a nucleic acid sequence encoding a protein or other biologically active nucleic acid-encoded molecule (BANEM), or a vector containing the nucleic acid sequence, wherein the treating comprises: a) injecting the composition into one or more subcutaneous (SC) regions of the subject such that one or more protein, or other BANEM, is detectable in a blood, serum, or plasma sample from the subject; and/or b) injecting the composition into one or more SC regions of the subject such that in-vivo transfected pre-adipocytes and/or adipocytes (e.g., transfected cells of fat cell origin) are generated; and/or c) performing the following: i) contacting pre-adipocytes and/or adipocytes (e.g., cells of fat cell origin) from the subject ex-vivo with the composition such that ex-vivo transfected pre-adipocytes and/or adipocytes are generated, and ii) injecting the ex-vivo transfected pre-adipocytes and/or adipocytes into one or more SC regions of the subject.

### BACKGROUND

[0004] The simplest non-viral gene delivery system uses naked expression vector DNA. Direct injection of free DNA into certain tissues, particularly muscle, has been shown to produce high levels of gene expression, and the simplicity of this approach has led to its adoption in a number of clinical protocols. In particular, this approach has been applied to the gene therapy of cancer where the DNA can be injected either directly into the tumor or can be injected into muscle cells in order to express tumor antigens that might function as a cancer vaccine.

[0005] Although direct injection of plasmid DNA into muscle has been shown to lead to gene expression, the overall level of expression is much lower than with either viral or liposomal vectors. Systemic administration of naked DNA is also generally thought to be unsuitable for systemic administration due to the presence of serum nucleases. As a result, direct injection of plasmid DNA appears to be limited to only a few applications involving tissues that are easily accessible to direct injection such as skin and muscle cells.

### SUMMARY

[0006] Provided herein are compositions, systems, kits, and methods for treating a subject, and/or a subject's adipocytes, with a composition (e.g., liquid composition) containing a nucleic acid sequence encoding a protein or a biologically active nucleic acid molecule (BANEM), or a vector containing the nucleic acid sequence, wherein the treating comprises: a) injecting the composition into one or more subcutaneous

[0007] (SC) regions of the subject such that the at least one protein, or BANEM, is detectable in a blood, serum, or plasma sample from the subject; and/or b) injecting the composition into one or more subcutaneous (SC) regions of the subject such that in-vivo transfected pre-adipocytes and/or adipocytes (e.g., transfected cells of fat cell origin) are generated; and/or c) performing the following: i) contacting transfected cells of fat cell origin from the subject ex-vivo with the composition such that ex-vivo transfected pre-adipocytes and/or adipocytes are generated, and ii) injecting the ex-vivo transfected pre-adipocytes and/or adipocytes into one or more SC regions of the subject.

[0008] Also provided herein is a method comprising treating a subject, and/or said subject's subcutaneous pre-adipocytes and/or adipocytes, with a composition, wherein said composition comprises, or consists essentially of, a nucleic acid sequence, or a vector containing said nucleic acid sequence, wherein said nucleic acid sequence encodes at least one protein or at least one biologically active nucleic acid molecule, and

wherein said treating comprises at least one of the following:
[0009] a) injecting said composition into one or more subcutaneous regions of said subject such that said at least one protein, or said at least one biologically active nucleic acid molecule, is detectable in a blood, serum, or plasma sample from said subject; and/or
[0010] b) injecting said composition into one or more subcutaneous regions of said subject such that a plurality of in-vivo transfected pre-adipocytes and/or adipocytes are generated in said subcutaneous region; and/or
[0011] c) performing the following:
   [0012] i) contacting a plurality said pre-adipocytes and/or adipocytes from said subject ex-vivo with said composition such that a plurality of ex-vivo transfected pre-adipocytes and/or adipocytes are generated, and
   [0013] ii) injecting at least some of said plurality of ex-vivo transfected pre-adipocytes and/or adipocytes into one or more subcutaneous regions of said subject.

[0014] Also provided herein is a method for the prevention, management or treatment of a disease or condition in a subject. In some embodiments, the disease or condition is associated with lipid storage disorders, such as but are not limited to Fabry disease, Gaucher disease, multiple sulfatase deficiency, Farber's lipogranulomatosis, Niemann-Pick disease, Wolman disease. In some embodiments, the disease or condition associated with lysosomal storage disorders, such as but are not limited to Schindler disease, Fucosidosis, Pompe disease, and Galactosialidosis. In some embodiments, the disease or condition is associated with a genetic disorder. In some embodiments, the disease or condition is associated with infection by a pathogen.

[0015] Also provided herein is a system comprising:
[0016] a) a plurality of transfected and enlarged adipocytes or pre-adipocytes, wherein each of said plurality of transfected and enlarged adipocytes or pre-adipocytes comprises an exogenous nucleic acid sequence, or a vector containing said nucleic acid sequence, wherein said nucleic acid sequence encodes at least one protein or at least one biologically active nucleic acid molecule, and
[0017] b) a first container, wherein said plurality of transfected and enlarged adipocytes or pre-adipocytes are present in said first container.

### BRIEF DESCRIPTION OF THE FIGURES

[0018] The patent or application file contains at least one drawing executed in color. Copies of this patent or patent application publication with color drawings will be provided by the Office upon request and payment of the necessary fee.

[0019] FIG. 1 shows the results from EXAMPLE 1, which shows serum expression levels (of anti-Sars-CoV-2 antibody) in mice receiving subcutaneously injected plasmids without any expression aid. Some mice also received a neutral lipid injection.

[0020] FIG. 2 shows the results from EXAMPLE 1, which shows serum expression levels (of human GCSF (h-GCSF)) in mice receiving subcutaneously injected plasmids encoding h-GCSF without any expression aid. Some mice also received chloroquine or neutral liposome.

[0021] FIG. 3 shows the results from EXAMPLE 2, which shows serum expression levels in rats receiving subcutaneously injected plasmids, with or without hyaluronidase.

[0022] FIG. 4 shows the results from EXAMPLE 3, which shows serum expression levels in rats receiving subcutaneously injected plasmids, with and without various pre-treatments.

[0023] FIG. 5 shows the results from EXAMPLE 4, which shows serum expression levels in rats receiving subcutaneously injected plasmids, with and without, lipid Pre-Treatment.

[0024] FIG. 6 shows the results from EXAMPLE 2, which shows long-term follow up of serum expression levels in rats receiving subcutaneously injected plasmids.

[0025] FIG. 7 shows the results from EXAMPLE 3, which shows serum protein level in rats receiving subcutaneously injected plasmids over 50 days, with or without hyaluronidase or pre-treatment with rituximab to deplete B cells.

[0026] FIG. 8 shows the results from EXAMPLE 4, which shows the level of the anti-Cov2 monoclonal antibody (209K) in female Sprague-Dawley rats (about 300 gram) receiving subcutaneously injected plasmids over an observation window of 106 days.

[0027] FIG. 9 shows the results from EXAMPLE 5, which shows in vitro transfection of human derived preadipocyte cells with a plasmid encoding 209K (anti-Cov2 antibody) using expifectamine (Expi), Polyethylenimine (PEI) or Dotap (DP). Cells were transfected via a direct (D) or thin-film (TF) method and a sample was collected every three days and assayed via hIgG ELISA. Values are mean SEM (n=2).

[0028] FIG. 10 shows the results from EXAMPLE 6, which shows in vitro transfection of human derived preadipocyte at various stages of the differentiation process towards adipocyte. Each stage of the differentiation cycle, starting with undifferentiated preadipocytes up to mature adipocytes, was transfected with the 209K (anti-CoV2 antibody) encoding plasmid using expifectamine. The media was changed out every three days and assayed via hIgG ELISA. Values are mean SEM (n=2).

[0029] FIG. 11 shows the results from EXAMPLE 7, which shows in vitro transfection of human adipocytes with 209K (anti-CoV-2 antibody) encoding plasmid using expifectamine (Expi), Polyethylenimine (PEI) or Dotap (DP). Cells were transfected via a direct (D) or thin-film (TF) method with either 1 or 5 μg plasmid DNA. Samples were collected every two days and assayed via hIgG ELISA. Values are mean SEM (n=2).

[0030] FIG. 12 shows the results from EXAMPLE 8, which shows the absolute neutrophil count (ANC) in obese mice 15 days after subcutaneous injection of plasmids encoding hGH-hGCSF.

[0031] FIG. 13 shows the results from EXAMPLE 9, which shows the hGLA expression level over 119 days in mice receiving subcutaneous injection of plasmids encoding hGLA-1×L-hyFc in 1 mL solution.

[0032] FIG. 14 shows the results from EXAMPLE 10, which shows high and long-term expression of hGLA in mice by subcutaneous injection of plasmids encoding hGLA-1×L-hyFc in smaller volumes.

[0033] FIG. 15 shows the results from EXAMPLE 11, which shows no expression of Factor VIII or IX in mice receiving subcutaneous injection of the encoding plasmid.

[0034] FIG. 16 shows the results from EXAMPLE 12, which shows the expression of antibody against SARS-CoV-2 by inguinal injections of plasmids at different doses and concentrations.

[0035] FIG. 17 shows the lack of correlation between the expression level of SARS-CoV-2 antibody and the body weight of the mice. No clear correlation between expression level and mice weight is observed.

[0036] FIG. 18 shows the results from EXAMPLE 13, which shows the expression level of SARS-CoV-2 antibody in mice administrated with the plasmid by surgical incision into the fat pad.

[0037] FIG. 19 shows the results from EXAMPLE 14, which shows the expression level of SARS-CoV-2 antibody in mice previously injected with a different plasmid.

[0038] FIG. 20 shows the results from EXAMPLE 15, which shows the expression level of hGLA in mice at various plasmid concentrations and hyaluronidase conditions.

[0039] FIG. 21 shows the lack of correlation between hGLA expression level and the body weight of mice. No clear correlation is observed.

[0040] FIG. 22 shows the results from EXAMPLE 17, which shows the expression level of hGLA with or without pretreatment with dexamethasone or TGF-beta3.

[0041] FIG. 23A shows the vector map for the base vector which is 1206 base pairs in length.

[0042] FIG. 23B illustrates the nucleic acid sequence for the base vector (SEQ ID NO:10).

[0043] FIG. 24A shows the vector map for the GLA-1×L-hyFc-Amp vector which is 5596 base pairs in length.

[0044] FIG. 24B illustrates the nucleic acid sequence for the GLA-1×L-hyFc-Amp vector (SEQ ID NO:11).

[0045] FIG. 25A shows the vector map for the GLA-1×L-hyFc-BV2 vector which is 4146 base pairs in length.

[0046] FIG. 25B illustrates the nucleic acid sequence for the GLA-1×L-hyFc-BV2 vector (SEQ ID NO:12).

[0047] FIG. 26A shows the vector map for the aCoV2-209 (H-P2A-L)-BV3 vector which is 5533 base pairs in length.

[0048] FIG. 26B illustrates the nucleic acid sequence for the aCoV2-209 (H-P2A-L)-BV3 vector (SEQ ID NO:13).

[0049] FIG. 27A shows the vector map for the aCoV2-209 (H-L)-BV3 vector which is 7298 base pairs in length.

[0050] FIG. 27B illustrates the nucleic acid sequence for the aCoV2-209 (H-L)-BV3 vector (SEQ ID NO:14).

[0051] FIG. 28A shows the vector map for the GHFc-GLA1×LhyFc-BV2 vector which is 6396 base pairs in length.

[0052] FIG. 28B illustrates the nucleic acid sequence for the GHFc-GLA1×LhyFc-BV2 vector (SEQ ID NO:15).

[0053] FIG. 29A shows the vector map for the GLA-hyFc-BV2 vector which is 4131 base pairs in length.

[0054] FIG. 29B illustrates the nucleic acid sequence for the GLA-hyFc-BV2 vector (SEQ ID NO:46).

[0055] FIG. 30A shows the vector map for the GLA-2×L-hyFc-BV2 vector which is 4161 base pairs in length.

[0056] FIG. 30B illustrates the nucleic acid sequence for the GLA-2×L-hyFc-BV2 vector (SEQ ID NO:47).

[0057] FIG. 31A shows the vector map the GLA-3×L-hyFc-BV2 vector which is 4176 base pairs in length.

[0058] FIG. 31B illustrates the nucleic acid sequence for the GLA-3×L-hyFc-BV2 vector (SEQ ID NO:48).

[0059] FIG. 32 shows the amino acid sequences of the encoded polypeptides: GLA-hyFc (SEQ ID NO:49), GLA-1×L-hyFc (SEQ ID NO:50), GLA-2×L-hyFc (SEQ ID NO:51) and GLA-3×L-hyFc (SEQ ID NO:52), respectively.

### DETAILED DESCRIPTION

### Definitions

[0060] Unless defined otherwise, all technical and scientific terms used herein have the same meaning as is commonly understood by one of ordinary skill in the art. All patents, applications, published applications and other publications are incorporated by reference in their entirety. In the event that there are a plurality of definitions for a term herein, those in this section prevail unless stated otherwise.

[0061] As used herein, and in the specification and the accompanying claims, the indefinite articles “a” and “an” and the definite article “the” include plural as well as single referents, unless the context clearly indicates otherwise.

[0062] As used herein, the term “or” is to be interpreted as an inclusive “or” meaning any one or any combination. Therefore, “A, B or C” means any of the following: “A; B; C; A and B; A and C; B and C; A, B and C”. An exception to this definition will occur only when a combination of elements, functions, steps or acts are in some way inherently mutually exclusive.

[0063] As used herein, the phrase “and/or” as used in a phrase such as “A and/or B” herein is intended to include both A and B; A or B; A (alone); and B (alone). Likewise, the phrase “and/or” as used in a phrase such as “A, B, and/or C” is intended to encompass each of the following embodiments: A, B, and C; A, B, or C; A or C; A or B; B or C; A and C; A and B; B and C; A (alone); B (alone); and C (alone).

[0064] As used herein, the term “about” or “approximately” means an acceptable error for a particular value as determined by one of ordinary skill in the art, which depends in part on how the value is measured or determined. In certain embodiments, the term “about” or “approximately” means within 1, 2, 3, or 4 standard deviations. In certain embodiments, the term “about” or “approximately” means within 50%, 25%, 20%, 15%, 10%, 9%, 8%, 7%, 6%, 5%, 4%, 3%, 2%, 1%, 0.5%, or 0.05% of a given value or range.

[0065] As used herein, the terms “comprising” and “including” can be used interchangeably. The terms “comprising” and “including” are to be interpreted as specifying the presence of the stated features or components as referred to, but does not preclude the presence or addition of one or more features, or components, or groups thereof. Additionally, the terms “comprising” and “including” are intended to include examples encompassed by the term “consisting of”. Consequently, the term “consisting of” can be used in place of the terms “comprising” and “including” to provide for more specific embodiments.

[0066] The term “composition” is intended to encompass a product containing the specified ingredients (e.g., a nucleic acid encoding a protein or other BANEM) in, optionally, the specified amounts.

[0067] “Carriers” as used herein include pharmaceutically acceptable carriers, excipients, or stabilizers that are nontoxic to the cell or mammal being exposed thereto at the dosages and concentrations employed. Often the physiologically acceptable carrier is an aqueous pH buffered solution. Examples of physiologically acceptable carriers include buffers, such as phosphate, citrate, and other organic acids; antioxidants, including ascorbic acid; low molecular weight (e.g., fewer than about 10 amino acid residues) polypeptide; proteins, such as serum albumin, gelatin, or immunoglobulins; hydrophilic polymers, such as polyvinylpyrrolidone; amino acids, such as glycine, glutamine, asparagine, arginine, or lysine; monosaccharides, disaccharides, and other carbohydrates, including glucose, mannose, or dextrins; chelating agents, such as EDTA; sugar alcohols, such as mannitol or sorbitol; salt-forming counterions, such as sodium; and/or nonionic surfactants and other tonicity adjusting agents, such as TWEEN™, polyethylene glycol (PEG), and PLURONICS™. The term “carrier” can also refer to a diluent, adjuvant (e.g., Freund's adjuvant (complete or incomplete)), excipient, or vehicle. Such carriers, including pharmaceutical carriers, can be sterile liquids, such as water and oils, including those of petroleum, animal, vegetable, or synthetic origin, such as peanut oil, soybean oil, mineral oil, sesame oil, and the like. Water is an exemplary carrier when a composition is administered intravenously. Saline solutions and aqueous dextrose and glycerol solutions can also be employed as liquid carriers, particularly for injectable solutions, such as Ringer's solution or lactated Ringer's solution. Suitable excipients (e.g., pharmaceutical excipients) include starch, glucose, lactose, sucrose, gelatin, malt, rice, flour, chalk, silica gel, sodium stearate, glycerol monostearate, talc, sodium chloride, dried skim milk, glycerol, propylene, glycol, water, ethanol, and the like. The composition, if desired, can also contain minor amounts of wetting or emulsifying agents, or pH buffering agents. Compositions can take the form of solutions, suspensions, emulsion, tablets, pills, capsules, powders, sustained-release formulations, and the like. Oral compositions, including formulations, can include standard carriers such as pharmaceutical grades of mannitol, lactose, starch, magnesium stearate, sodium saccharine, cellulose, magnesium carbonate, etc. Examples of suitable pharmaceutical carriers are described in Remington and Gennaro, Remington's Pharmaceutical Sciences (18th ed. 1990).

[0068] The term “pharmaceutically acceptable” as used herein means being approved by a regulatory agency of the Federal or a state government, or listed in United States Pharmacopeia, European Pharmacopeia, or other generally recognized Pharmacopeia for use in animals, and more particularly in humans.

[0069] The term “excipient” refers to an inert substance which is commonly used as a diluent, vehicle, preservative, binder, or stabilizing agent, and includes, but is not limited to, proteins (e.g., serum albumin, etc.), amino acids (e.g., aspartic acid, glutamic acid, lysine, arginine, glycine, histidine, etc.), fatty acids and phospholipids (e.g., alkyl sulfonates, caprylate, etc.), surfactants (e.g., SDS, polysorbate, nonionic surfactant, etc.), saccharides (e.g., sucrose, maltose, trehalose, etc.), and polyols (e.g., mannitol, sorbitol, etc.). See, also, Remington and Gennaro, Remington's Pharmaceutical Sciences (18th ed. 1990), which is hereby incorporated by reference in its entirety.

[0070] The term “diluent” refers to chemical compounds that are used to dilute the compound of interest prior to delivery. Diluents can also be used to stabilize compounds because they can provide a more stable environment. Salts dissolved in buffered solutions (which also can provide pH control or maintenance) are utilized as diluents in the art, including, but not limited to a phosphate buffered saline solution. In certain embodiments, diluents increase bulk of the composition to facilitate compression or create sufficient bulk for homogenous blending. Such compounds include e.g., lactose, starch, mannitol, sorbitol, dextrose, cellulose, calcium phosphate, lactose; starch, mannitol, dextrates, amylose, cellulose, and the like.

[0071] As used herein, the term “subject” refers to an animal, including, but not limited to, a primate (e.g., human), cow, sheep, goat, horse, dog, cat, rabbit, rat, or mouse. The terms “subject” and “patient” are used interchangeably herein in reference, for example, to a mammalian subject, such as a human subject. In one embodiment, the subject is a mammal. In one embodiment, the subject is a human.

[0072] As used herein, the terms “treat,” “treating,” and “treatment” refer to the eradication or amelioration of a disease or disorder, or of one or more symptoms associated with the disease or disorder. In general, treatment occurs after the onset of the disease or disorder. In certain embodiments, the terms refer to minimizing the spread or worsening of the disease or disorder resulting from the administration of one or more prophylactic or therapeutic agents to a subject with such a disease or disorder.

[0073] As used herein, the term “administration” refers to the act of giving a composition as described herein to a subject. Exemplary routes of administration to the human body can be through the mouth (oral), skin (transdermal, topical), nose (nasal), lungs (inhalant), oral mucosa (buccal), by injection (e.g., intravenously, subcutaneously, intratumorally, intraocular, intraperitoneally, etc.), by transplantation (e.g. through an incision surgery) and the like.

[0074] As used herein, the terms “prevent,” “preventing,” and “prevention” refer to the prevention of the onset, recurrence or spread of a disease or disorder, or of one or more symptoms thereof. In general, prevention occurs prior to the onset of the disease or disorder.

[0075] As used herein, and unless otherwise specified, the terms “manage,” “managing,” and “management” refer to preventing or slowing the progression, spread or worsening of a disease or disorder, or of one or more symptoms thereof. Sometimes, the beneficial effects that a subject derives from a prophylactic or therapeutic agent do not result in a cure of the disease or disorder.

[0076] As used herein, and unless otherwise specified, the term “therapeutically effective amount” are meant to include the amount of a compound that, when administered, is sufficient to prevent development of, or alleviate to some extent, one or more of the symptoms of the disorder, disease, or condition being treated. The term “therapeutically effective amount” also refers to the amount of a compound that is sufficient to elicit the biological or medical response of a cell, tissue, system, animal, or human, which is being sought by a researcher, veterinarian, medical doctor, or clinician.

[0077] The term “fat pad” as used herein refers to any cushions made of a pocket of fascia and filled with fat deposits (e.g. fatty acids in fat cells) that are present in humans or mammalians.

[0078] The term “adipocytes” as used herein refers to the functional cell type of fat, or adipose tissue, that is found throughout the body, particularly under the skin. Adipocytes store and synthesize fat or triglycerides for energy, thermal regulation and cushioning against mechanical shock. Without bound by the theory, it appears that mesenchymal stem cells can differentiate into two types of lipoblasts, one that give rise to white adipocytes and the other to brown adipocytes. Both types of adipocytes store fat. Adipose tissue may be brown or white adipose tissue, derived from, for example, subcutaneous, omental/visceral, mammary, gonadal, periorgan or other adipose tissue site. In some embodiments, adipose tissue is subcutaneous white adipose tissue. The adipose tissue may be from any organism having fat tissue. In some embodiments, the adipose tissue is mammalian. In some embodiments, the adipose tissue is in a human subject. A convenient source of adipose tissue is liposuction surgery. In some embodiments, adipocyte cells as described herein are desired for autologous transplantation into a subject. In some embodiments, the adipose tissue can be isolated from that subject.

[0079] The term “pre-adipocyte” as used herein refers to adipocyte precursor cells that, under the action of hormones such as insulin and glucocorticoid, divide and differentiate into adipocytes. Morphologically, pre-adipocytes are fibroblast-looking (i.e., thin and spindle-shaped) and devoid of triglyceride vesicles in their cytoplasm. As compared to adipocytes, pre-adipocytes contain low levels of insulin receptor and relatively high levels of IGF-1 receptors for receiving mitogenic and differentiating signals.

[0080] The term “subcutaneous” refer to “under the skin,” i.e., administered into the subcutis, the layer of skin directly below the dermis and epidermis (collectively referred to as the cutis), above muscle. In some embodiments, a composition as described herein is delivered to a subject subcutaneously, such as with the use of a standard needle and syringe. In some embodiments, the syringe is a pre-filled syringe. In some embodiments, a pen delivery device or autoinjector is used for subcutaneous delivery. Non-limiting examples of disposable pen delivery devices having applications in subcutaneous delivery include the SOLOSTAR™ pen (sanofi-aventis), the FLEXPEN™ (Novo Nordisk), and the KWIKPEN™ (Eli Lilly) and the SURECLICK™ Autoinjector (Amgen, Thousand Oaks, Calif.). In some embodiments, a composition as described herein is delivered to a subject subcutaneously, such as through transplantation in an incision surgery. In some embodiments, a subcutaneous incision is made in a subject to expose the fat tissue, and a solid medium (e.g., a sterile strip carrying effective amount of a therapeutic composition containing plasmid DNA) is placed into or near the fat tissue before the incision is closed up through a standard surgical procedure.

[0081] The term “incision” refers to a cut, opening, flap or penetration, typically in the course of minimally invasive or less-invasive surgery. An incision can be made with, for example, a knife, needle, blade, lancet, scalpel, laser, or other mechanism. In some embodiments, the incision is performed by lifting up the skin. In some embodiments, an incision extends beyond the dermal layer of a subject's skin. In some embodiments, the site of incision exposes adipocytes or pre-adipocytes. In some embodiments, the site of incision has damaged cells. In some embodiments, a composition described herein is administrated by incision.

[0082] The term “vector” refers to a vehicle into which a polynucleotide encoding a protein may be operably inserted so as to bring about the expression of that protein. A vector may be used to transform, transduce, or transfect a host cell so as to bring about expression of the genetic element it carries within the host cell. Non-limiting examples of vectors include plasmids, phagemids, cosmids, artificial chromosomes such as yeast artificial chromosome (YAC), bacterial artificial chromosome (BAC), or P1-derived artificial chromosome (PAC), bacteriophages such as lambda phage or M13 phage, and animal viruses. Categories of animal viruses used as vectors include retrovirus (including lentivirus), adenovirus, adeno-associated virus, herpesvirus (e.g., herpes simplex virus), poxvirus, baculovirus, papillomavirus, and papovavirus. A vector may contain a variety of elements for controlling expression, including promoter sequences, transcription initiation sequences, enhancer sequences, selectable elements, and reporter genes. In addition, the vector may contain an origin of replication. A vector may also include materials to aid in its entry into the cell, including but not limited to a viral particle, a liposome, or a protein coating.

[0083] The term “nucleic acid” refers to at least two or more ribo- or deoxy-ribonucleic acid base pairs (nucleotides/nucleosides) that are linked through a phosphoester bond or equivalent. Nucleic acids include polynucleotides. Nucleic acids include single, double or triplex, circular or linear, molecules. Exemplary nucleic acids include but are not limited to: RNA, DNA, cDNA, genomic nucleic acid, naturally occurring and non-naturally occurring nucleic acid, e.g., synthetic nucleic acid. Nucleic acids can be of various lengths. Nucleic acid lengths typically range from about 20 bases to 20 Kilobases (Kb), or any numerical value or range within or encompassing such lengths, 10 bases to 10 Kb, 1 to 5 Kb or less, 1000 to about 500 bases or less in length. Nucleic acids can also be shorter, for example, 100 to about 500 bases, or from about 12 to 24, 24 to 45, 45 to 90, 90 to 250, or about 250 to 500 bases in length. In some embodiments, a nucleic acid sequence has a length from about 10-20, 20-30, 30-50, 50-100, 100-150, 150-200, 200-250, 250-300, 300-400, 400-500, 500-1000, 1000-3000 bases. Shorter nucleic acids are commonly referred to as “oligonucleotides”. In some embodiment, nucleic acid sequences further include nucleotide and nucleoside substitutions, additions and deletions, as well as derivatized forms and fusion/chimeric sequences (e.g., encoding recombinant polypeptide. Nucleic acids can be produced using various techniques that includes, but are not limited to nucleic acid amplification, e.g., polymerase chain reaction (PCR). Nucleic acids can also be produced by chemical synthesis, such as solid phase phosphoramidite synthesis. The sequences produced can then be translated in vitro, or cloned into a plasmid and propagated and then expressed in a cell.

[0084] The term “CpG-reduced” as used herein refers to a nucleic acid sequence or expression vector that has less CpG di-nucleotides than present in the wild-type versions of the sequence or vector. “CpG-free” means the subject nucleic acid sequence or vector does not have any CpG di-nucleotides. An initial sequence, that contains CpG dinucleotides (e.g., wild-type version of an anti-SARS-CoV-2 antibody), may be modified to remove CpG dinucleotides by altering the nucleic acid sequence. Such CpG di-nucleotides can be suitably reduced or eliminated not just in a coding sequence, but also in the non-coding sequences, including, e.g., 5′ and 3′ untranslated regions (UTRs), promoter, enhancer, polyA, ITRs, introns, and any other sequences present in the nucleic acid molecule or vector. In certain embodiments, the nucleic acid sequences employed herein are CpG-reduced or CpG-free.

[0085] The term “plasmid” as used herein refers to an extrachromosomal nucleic acid, e.g., DNA, construct that is not integrated into a bacterial cell's genome. Plasmids are usually circular and capable of autonomous replication. Plasmids may be low-copy, medium-copy, or high-copy. Plasmids may optionally comprise a selectable marker, such as an antibiotic resistance gene to help select for bacterial cells containing the plasmid and which ensures that the plasmid is retained in the bacterial cell. A plasmid as used herein may comprise a nucleic acid sequence encoding a heterologous gene, e.g., a gene encoding a branched chain amino acid catabolism enzyme. In some embodiment, the plasmid is used as a vector.

[0086] The term “mRNA” means “messenger-RNA” and relates to a “transcript” which is generated by using a DNA template and encodes a peptide or polypeptide. Typically, an mRNA comprises a 5′-UTR, a protein coding region, and a 3′-UTR. The term “mRNA” can include precursor mRNA and mature mRNA, either the full-length mRNA or its fragment. In some embodiment, mRNA may be generated by in vitro transcription from a DNA template. the stability and translation efficiency of RNA may be modified as required. In some embodiments, mRNA is stabilized and its translation increased by one or more modifications having a stabilizing effects and/or increasing translation efficiency of RNA. Such modifications are described, for example, in PCT/EP2006/009448 incorporated herein by reference. The modification maybe within the coding region, i.e. the sequence encoding the expressed peptide or protein, preferably without altering the sequence of the expressed peptide or protein, so as to increase the GC-content to increase mRNA stability and to perform a codon optimization and thereby enhance translation in cells.

[0087] The term “antibody,” “immunoglobulin,” or “Ig” is used interchangeably herein, and is used in the broadest sense and specifically encompasses, for example, individual monoclonal antibodies (including agonist, antagonist, neutralizing antibodies, full length or intact monoclonal antibodies), antibody compositions with polyepitopic or monoepitopic specificity, polyclonal or monovalent antibodies, multivalent antibodies, multispecific antibodies (e.g., bispecific antibodies so long as they exhibit the desired biological activity), formed from at least two intact antibodies, single chain antibodies, and fragments of antibodies, as described below. An antibody can be human, humanized, chimeric and/or affinity matured, as well as an antibody from other species, for example, mouse and rabbit, etc. The term “antibody” is intended to include a polypeptide product of B cells within the immunoglobulin class of polypeptides that is able to bind to a specific molecular antigen and is composed of two identical pairs of polypeptide chains, wherein each pair has one heavy chain (about 50-70 kDa) and one light chain (about 25 kDa), each amino-terminal portion of each chain includes a variable region of about 100 to about 130 or more amino acids, and each carboxy-terminal portion of each chain includes a constant region. See, e.g., Antibody Engineering (Borrebaeck ed., 2d ed. 1995); and Kuby, Immunology (3d ed. 1997). In specific embodiments, the specific molecular antigen can be bound by an antibody provided herein, including a protein, a fragment of a protein, or an epitope of a protein. Antibodies also include, but are not limited to, synthetic antibodies, recombinantly produced antibodies, camelized antibodies, intrabodies, anti-idiotypic (anti-Id) antibodies, and functional fragments (e.g., antigen-binding fragments or antigen binding portions) of any of the above, which refers to a portion of an antibody heavy or light chain polypeptide that retains some or all of the binding activity of the antibody from which the fragment was derived. Non-limiting examples of functional fragments (e.g., antigen-binding fragments) include single-chain Fvs (scFv) (e.g., including monospecific, bispecific, etc.), Fab fragments, F(ab′) fragments, F(ab)₂ fragments, F(ab′)₂ fragments, disulfide-linked Fvs (dsFv), Fd fragments, Fv fragments, diabody, triabody, tetrabody, and minibody. In particular, antibodies provided herein include immunoglobulin molecules and immunologically active portions of immunoglobulin molecules, for example, antigen-binding domains or molecules that contain an antigen-binding site that binds to an antigen (e.g., one or more CDRs of an antibody). Such antibody fragments can be found in, for example, Harlow and Lane, Antibodies: A Laboratory Manual (1989); Mol. Biology and Biotechnology: A Comprehensive Desk Reference (Myers ed., 1995); Huston et al., 1993, Cell Biophysics 22:189-224; Plückthun and Skerra, 1989, Meth. Enzymol. 178:497-515; and Day, Advanced Immunochemistry (2d ed. 1990). The antibodies provided herein can be of any class (e.g., IgG, IgE, IgM, IgD, and IgA) or any subclass (e.g., IgG1, IgG2, IgG3, IgG4, IgA1, and IgA2) of immunoglobulin molecule. Antibodies may be agonistic antibodies or antagonistic antibodies.

[0088] The term “monoclonal antibody” or “mAb” as used herein refers to an antibody obtained from a population of substantially homogeneous antibodies, i.e., the individual antibodies comprising the population are identical except for possible naturally occurring mutations that may be present in minor amounts. Monoclonal antibodies are highly specific, being directed against a single antigenic site. In contrast to polyclonal antibody preparations, which include different antibodies directed against different determinants (epitopes), each monoclonal antibody is directed against a single determinant on the antigen. In addition to their specificity, the monoclonal antibodies are advantageous in that they may be synthesized uncontaminated by other antibodies. The modifier “monoclonal” indicates the character of the antibody as being obtained from a substantially homogeneous population of antibodies. Monoclonal antibody as used herein is not limited to antibodies produced through hybridoma technology. A monoclonal antibody can be derived from a single clone, including any eukaryotic, prokaryotic, or phage clone, by any means available or known in the art.

[0089] The term “humanized monoclonal antibody” as used herein refers to that all or most of the amino acid sequences of the murine monoclonal antibodies (including the framework region sequence in the variable region), except complementarity-determining regions (CDR) are substituted by the amino acid sequences of human immunoglobulins, to reduce the immunogenicity of the murine monoclonal antibody by genetic engineering methods.

[0090] The term “glycosidase” as used herein refers to an agent that cleaves a covalent bond between sequential sugars in a glycan or between the sugar and the backbone moiety (e.g. between sugar and peptide backbone of glycoprotein). In some embodiments, a glycosidase is an enzyme. In certain embodiments, a glycosidase is a protein (e.g., a protein enzyme) comprising one or more polypeptide chains.

[0091] The term “galactosidase” as used herein refers to a class of enzymes that catalyze the hydrolysis and cleave terminal galactose residues. Galactosidases include “beta-galactosidase” that catalyzes the hydrolysis of beta-galactosides to form monosaccharides and “alpha-galactosidase” that catalyzes the hydrolysis of alpha-galactosides to form monosaccharides. Substrates of beta-galactosidases includes, but are not limited to, ganglioside GM1, lactosylceramides, lactose, and various glycoproteins.

[0092] The term “antigen” refers to a molecule that is capable of being bound specifically by an antibody, or otherwise provokes an immune response. This immune response may involve either antibody production, or the activation of specific immunologically-competent cells, or both. It is known in the art that any macromolecule, including virtually all proteins or peptides, can serve as an antigen.

[0093] The term “pathogen” refers to an organism or an infectious agent whose infection of cells of viable plant tissue elicits a disease response. In some embodiments, the pathogen is a bacteria. In some embodiments, the pathogen is a virus, particularly coronavirus.

[0094] The term “coronavirus” is a term of art which refers to an enveloped virus with a positive-sense single-stranded RNA genome and a helical symmetry. The genomic size of coronaviruses ranges from approximately 27 to 32 kilobases. Large Spike (S) glycoproteins protrude from the virus particle giving coronaviruses a distinctive corona-like appearance when visualized by electron microscopy. Coronaviruses infect a wide variety of species, including canine, feline, porcine, murine, bovine, avian and human. Coronaviruses typically bind to target cells through Spike-receptor interactions and enter cells by receptor mediated endocytosis or fusion with the plasma membrane. The Spike-receptor interaction is a strong determinant of species specificity.

[0095] The term “transfection” refers to the uptake of foreign DNA by a cell. A cell has been “transfected” when exogenous DNA has been introduced inside the cell membrane. A number of transfection techniques are generally known in the art. See, e.g., Graham et al. (1973) Virology, 52:456, Sambrook et al. (2001) Molecular Cloning, a laboratory manual, 3rd edition, Cold Spring Harbor Laboratories, New York, Davis et al. (1995) Basic Methods in Molecular Biology, 2nd edition, McGraw-Hill, and Chu et al. (1981) Gene 13:197. Such techniques can be used to introduce one or more exogenous DNA moieties into suitable host cells. The term refers to both stable and transient uptake of the genetic material.

[0096] The term “lipid” as used herein refers to a synthetic or naturally-occurring compound which is generally amphipathic and biocompatible. The lipids typically comprise a hydrophilic component and a hydrophobic component. Exemplary lipids include, for example, fatty acids, neutral fats, phosphatides, glycolipids, surface-active agents (surfactants), aliphatic alcohols, waxes, terpenes, and steroids. In some embodiments, the lipid is a phospholipid. Exemplary phospholipids that can form part of the liposomes as used herein include but are not limited to 1,2-distearoyl-sn-glycero-3-phosphocholine (DSPC), 1,2-dioleoyl-sn-glycero-3-phosphoethanolamine (DOPE), 1,2-dilinoleoyl-sn-glycero-3-phosphocholine (DLPC), 1,2-dimyristoyl-sn-glycero-phosphocholine (DMPC), 1,2-dioleoyl-sn-glycero-3-phosphocholine (DOPC), 1,2-dipalmitoyl-sn-glycero-3-phosphocholine (DPPC).

[0097] The term “cationic lipid” includes lipids and synthetic lipids having both polar and non-polar domains and which are capable of being positively charged at or around physiological pH and which bind to polyanions, such as nucleic acids. In some embodiments, cationic lipids include saturated and unsaturated alkyl and alicyclic ethers and esters of amines, amides, or derivatives thereof. In some embodiments, cationic lipids comprise straight-chain, branched alkyl, alkenyl groups, or any combination of the foregoing. In some embodiments, cationic lipids contain from 1 to about 25 carbon atoms. In some embodiments, cationic lipids contain more than 25 carbon atoms. In some embodiments, straight chain or branched alkyl or alkene groups have six or more carbon atoms. In some embodiment, the cationic lipid is a cationic phospholipid. In some embodiments, the cationic lipid is N-[1-(2,3-dioleoyloxy)propyl]-N,N,N-trimethylammonium chloride (DOTAP).

[0098] The term “neutral lipid” refers to any of a number of lipid species which exist either in an uncharged or neutral zwitterionic form a physiological pH. Such lipids include, for example, diacylphosphatidylcholine, diacylphosphatidylethanolamine, ceramide, sphingomyelin, cephalin, cholesterol, cerebrosides and diacylglycerols. Certain neutral lipids, including cholesterol and other sterol derivatives, are known to increase the stability of liposomes and are referred to as “liposomes stabilizing lipids”.

[0099] The term “liposome” as used herein, refers to a vesicle composed of amphiphilic lipids arranged in at least one bilayer, e.g., one bilayer or a plurality of bilayers. Liposomes include unilamellar and multilamellar vesicles (MLV)that have a membrane formed from a lipophilic material and an aqueous interior. Multilamellar vesicles have more than one layer of membranes. Unilamellar vesicles have one single layer of membrane. The unilamellar vesicles may be large unilamellar vesicles (LUVs) or small unilamellar vesicles (SUVs). The term “large unilamellar vesicles” or “LUVs” as used herein means unilamellar vesicles having a diameter of between about 0.1 to 1 μm. The term “small unilamellar vesicles” or “SUV” as used herein means unilamellar vesicles having a diameter of less than 100 nm. The lipophilic material of liposome isolates the aqueous interior from an aqueous exterior. Liposomes are useful for the transfer and delivery of active ingredients to the site of action. Because the liposomal membrane is structurally similar to biological membranes, when liposomes are applied to a tissue, the liposomal bilayer fuses with bilayer of the cellular membranes, thereby facilitating the delivery of therapeutic payloads on or inside the liposome. In some embodiment, the liposome used herein is small unilamellar vesicle (SUV). In some embodiment, the liposome used herein is multilamellar vesicle (MLV).

[0100] The term “cationic liposome” refers to liposomes that are made in whole or part from positively charged lipids, or more specifically a lipid that comprises both a cationic group and a lipophilic portion. The positively charged moieties of cationic lipids used in cationic liposomes provide advantageous structural features. For instance, the lipophilic portion of the cationic lipid is hydrophobic and thus may direct itself away from the aqueous interior of the liposome and associate with other nonpolar and hydrophobic species, or conversely, the cationic moiety may associate with polar molecules and species with which it can complex in the aqueous interior of the cationic liposome. The positively charged liposomes may interact with the negatively charged nucleic acid molecules to form a stable complex. Positively charged liposomes can bind to negatively charged cell surface constituents (e.g., heparin sulfate proteoglycans and integrins) and trigger cellular uptake mainly by endocytosis.

[0101] The term “neutral liposomes” refers to liposomes that contain lipid components that have an overall neutral charge at physiological pH. Neutral liposomes are less susceptible to interaction with negative constituents in the circulation after systemic delivery, compared to cationic liposomes. Cationic liposomes bind to and are taken up by endothelial cells after systemic delivery, while anionic and neutral liposomes are generally not.

[0102] As used herein, “empty liposomes” refers to liposomes that do not contain nucleic acid molecules but that may contain other bioactive molecules (e.g., liposomes that are only composed of the lipid molecules themselves, or only lipid molecules and a small molecule drug). In certain embodiments, empty liposomes are used with any of the methods or compositions described herein.

[0103] As used herein, “empty cationic micelles” refers to cationic micelles that do not contain nucleic acid molecules but that may contain other bioactive molecules (e.g., micelles that are only composed of lipid and surfactant molecules themselves, or only lipid and surfactant molecules and a small molecule drug). In certain embodiments, empty cationic micelles are used with any of the methods or compositions described herein.

[0104] As used herein, “empty cationic emulsions” refers to cationic emulsions or micro-emulsions that do not contain nucleic acid molecules but that may contain other bioactive molecules. In certain embodiments, empty cationic emulsions are used with any of the methods or compositions described herein.

[0105] The term “hyaluronidase” as used herein refers to an enzyme that decomposes hyaluronic acid. The hyaluronidase may be derived from mice, sheep, cattle, or humans. The hyaluronidase may be human hyaluronidase or recombinant human hyaluronidase. The term hyaluronidase as used herein includes its salts and derivatives which retain its enzymatic activity. A recombinant form of hyaluronidase for human injection, sold under the, trademark Hylenex® (Halozyme, Inc., San Diego, Calif.), is an FDA approved enzyme. Without bound by the theory, hyaluronidase hydrolyzes hyaluronic acid by cleaving the 0-1,4 bond between the glucosamine and glucuronic acid.

[0106] The term “isotonic” as used herein refers to a solution wherein the osmotic pressure gradient across the cell membrane is essentially balanced. An isotonic formulation is one which has essentially the same osmotic pressure as the blood of a subject. Isotonic formulations will generally have an osmotic pressure from about 250 mOsm/kg to 350 mOsm/kg.

[0107] The term “hypertonic” as used herein refers to a fluid having an osmotic concentration and a density greater than the osmotic concentration and density of blood of a subject. The physiologic, isotonic concentration of human blood is about 290 milli-osmols. In some embodiment, a hypertonic solution comprises a salt, such as a potassium salt, a sodium salt or a calcium salt. In some embodiment, a hypertonic solution comprises glucose and/or nonelectrolytes, such as mannitol. The term “hypertonic saline” as used herein refers to a solution of sodium chloride in water having a concentration of sodium chloride greater than 0.9% w/v.

[0108] The term “hypotonic” as used herein refers to a fluid having an osmotic concentration and a density lower than the osmotic concentration and density of blood of a subject. When a cell is immersed into a hypotonic solution, water flows into the cell in order to balance the concentration of the solutes. In some embodiments, the hypotonic solution comprises a salt. In one embodiment, the salt is sodium chloride. In one embodiment, the salt is potassium chloride. In one embodiment, the hypotonic solution comprises electrolytes. The term “hypotonic saline” as used herein refers to a solution of sodium chloride in water having an osmolality lower than 290 milli-osmols or a concentration of sodium chloride lower than 0.9% w/v.

[0109] As used herein, the term “alkyl” means a straight or branched saturated hydrocarbon chain containing from 1 to 30 carbon atoms, for example 1 to 16 carbon atoms (C₁-C₁₆ alkyl), 1 to 14 carbon atoms (C₁-C₁₄ alkyl), 1 to 12 carbon atoms (C₁-C₁₂ alkyl), 1 to 10 carbon atoms (C₁-C₁₀ alkyl), 1 to 8 carbon atoms (C₁-C₈ alkyl), 1 to 6 carbon atoms (C₁-C₆ alkyl), 1 to 4 carbon atoms (C₁-C₄ alkyl), or 5 to 23 carbon atoms (C₅-C₂₃ alkyl). Representative examples of alkyl include, but are not limited to, methyl, ethyl, n-propyl, iso-propyl, n-butyl, sec-butyl, iso-butyl, tert-butyl, n-pentyl, isopentyl, neopentyl, n-hexyl, 3-methylhexyl, 2,2-dimethylpentyl, 2,3-dimethylpentyl, n-heptyl, n-octyl, n-nonyl, n-decyl, n-undecyl, and n-dodecyl.

[0110] As used herein, the term “alkenyl” refers to a straight or branched hydrocarbon chain containing from 2 to 30 carbon atoms and containing at least one carbon-carbon double bond, for example 2 to 16 carbon atoms (C₂-C₁₆ alkyl), 2 to 14 carbon atoms (C₂-C₁₄ alkyl), 2 to 12 carbon atoms (C₂-C₁₂ alkyl), 2 to 10 carbon atoms (C₂-C₁₀ alkyl), 2 to 8 carbon atoms (C₂-C₈ alkyl), 2 to 6 carbon atoms (C₂-C₆ alkyl), 2 to 4 carbon atoms (C₂-C₄ alkyl), or 5 to 23 carbon atoms (C₅-C₂₃ alkyl). Representative examples of alkenyl include, but are not limited to, ethenyl, 2-propenyl, 2-methyl-2-propenyl, 3-butenyl, 4-pentenyl, 5-hexenyl, 2-heptenyl, 2-methyl-1-heptenyl, and 3-decenyl.

### Methods and Compositions

[0111] Provided herein are compositions, systems, kits, and methods for treating a subject, and/or a subject's adipocytes, with a composition containing a nucleic acid sequence encoding a protein or a biologically active nucleic acid encoded molecule (BANEM), or a vector containing the nucleic acid sequence, wherein the treating comprises: a) injecting the composition into a subcutaneous (SC) region of the subject such that the at least one protein, or BANEM, is detectable in a blood, serum, or plasma sample from the subject; and/or b) injecting the composition into an SC region of the subject such that in-vivo transfected pre-adipocytes and/or adipocytes (e.g., cells of fat cell origin) are generated; c) performing the following: i) contacting adipocytes pre-adipocytes and/or adipocytes (e.g., cells of fat cell origin) from the subject ex-vivo with the composition such that ex-vivo transfected pre-adipocytes and/or adipocytes are generated, and ii) injecting the ex-vivo transfected pre-adipocytes and/or adipocytes into one or more SC regions of the subject; and/or d) implanting a solid medium carrying the composition into one or more subcutaneous regions of the subject.

[0112] In one embodiment, provided herein is a method of treating a subject. In one embodiment, provided herein is a method of treating the subcutaneous pre-adipocytes of a subject. In one embodiment, provided herein is a method of treating the subcutaneous adipocytes of a subject. In one embodiment, provided herein is a method of treating the subcutaneous pre-adipocytes and adipocytes of a subject.

[0113] In one embodiment, provided herein is a method comprising: treating a subject, and/or the subject's subcutaneous pre-adipocytes and/or adipocytes, with a composition, wherein the composition comprises, or consists essentially of, a nucleic acid sequence, or a vector containing the nucleic acid sequence, wherein the nucleic acid sequence encodes at least one protein (e.g., one, two, three, four, five, six, or more proteins), or at least one biologically active nucleic acid molecule (e.g., one, two, three, four, five, six, or more biologically active nucleic acid molecules), and wherein the treating comprises at least one of the following:

[0114] a) injecting the composition into one or more subcutaneous regions of the subject (e.g., fat pad, buttocks, stomach, etc.) such that the at least one protein, or the at least one biologically active nucleic acid encoded molecule, is detectable in a blood, serum, or plasma sample from the subject; and/or

[0115] b) injecting the composition into one or more subcutaneous regions of the subject such that a plurality of in-vivo transfected pre-adipocytes and/or adipocytes are generated in the subcutaneous region(s);

[0116] c) performing the following:
[0117] i) contacting a plurality of the pre-adipocytes and/or adipocytes from the subject ex-vivo with the composition such that a plurality of ex-vivo transfected pre-adipocytes and/or adipocytes are generated, and
[0118] ii) injecting at least some of the plurality of ex-vivo transfected pre-adipocytes and/or adipocytes into one or more subcutaneous regions of the subject; and/or

[0119] d) implanting a solid medium carrying the composition into one or more subcutaneous regions of the subject.

[0120] Nucleic Acid Containing Compositions

[0121] In one embodiment, the composition comprises a nucleic acid sequence. In one embodiment, the nucleic acid sequence is comprised in a vector. In some embodiments, the vector is a transfection vector. In some embodiments, the vector is an expression vector. In one embodiment, the vector comprises a non-viral vector. In one embodiment, the vector comprises a plasmid. In one embodiment, the plasmid is a Resistance plasmid. In one embodiment, the plasmid is a Fertility plasmid. In one embodiment, the plasmid is a Col plasmid. In one embodiment, the plasmid is a Degradative plasmid. In some embodiments, the vector comprising the nucleic acid sequence is not attached to or encapsulated in, any delivery agent.

[0122] In one embodiment, the nucleic acid sequence comprises DNA. In one embodiment, the nucleic acid sequence comprises plasmid DNA. In one embodiment, the nucleic acid sequence comprises linear DNA. In one embodiment, the nucleic acid sequence comprises circular DNA. In one embodiment, the nucleic acid sequence comprises supercoiled DNA.

[0123] In one embodiment, the nucleic acid comprises mRNA, and wherein the mRNA is optionally capped and composed of at least some modified bases that reduce immunogenicity.

[0124] In some embodiments, the vector comprises a nucleic acid sequence encoding for at least one protein. In one embodiment, the nucleic acid sequence encodes one protein. In one embodiment, the nucleic acid sequence encodes two proteins. In one embodiment, the nucleic acid sequence encodes three proteins. In one embodiment, the nucleic acid sequence encodes four proteins. In one embodiment, the nucleic acid sequence encodes five proteins. In one embodiment, the nucleic acid sequence encodes six proteins. In one embodiment, the nucleic acid sequence encodes seven proteins. In one embodiment, the nucleic acid sequence encodes eight proteins. In one embodiment, the nucleic acid sequence encodes nine proteins. In one embodiment, the nucleic acid sequence encodes ten proteins. In one embodiment, the nucleic acid sequence encodes twelve proteins. In one embodiment, the nucleic acid sequence encodes fourteen proteins. In one embodiment, the nucleic acid sequence encodes sixteen proteins. In one embodiment, the nucleic acid sequence encodes eighteen proteins. In one embodiment, the nucleic acid sequence encodes twenty or more proteins. In some embodiments, the two or more proteins encoded by the nucleic acid sequence are configured to function cooperatively. In particular embodiments, a first of the two or more proteins encoded by the nucleic acid sequence is an antibody heavy chain or an antigen binding fragment of the heavy chain, while a second of the two or more proteins encoded by the nucleic acid sequence is an antibody light chain or an antigen binding fragment of the light chain, where the two proteins form a functional antibody or antigen binding portion of an antibody.

[0125] In one embodiment, the nucleic acid sequence encodes one or more BANEMs. In one embodiment, the nucleic acid sequence encodes two BANEMs. In one embodiment, the nucleic acid sequence encodes three BANEMs. In one embodiment, the nucleic acid sequence encodes four BANEMs. In one embodiment, the nucleic acid sequence encodes five BANEMs. In one embodiment, the nucleic acid sequence encodes six BANEMs. In one embodiment, the nucleic acid sequence encodes seven BANEMs. In one embodiment, the nucleic acid sequence encodes eight BANEMs. In one embodiment, the nucleic acid sequence encodes nine BANEMs. In one embodiment, the nucleic acid sequence encodes ten BANEMs. In one embodiment, the nucleic acid sequence encodes twelve BANEMs. In one embodiment, the nucleic acid sequence encodes fourteen BANEMs. In one embodiment, the nucleic acid sequence encodes sixteen BANEMs. In one embodiment, the nucleic acid sequence encodes eighteen BANEMs. In one embodiment, the nucleic acid sequence encodes twenty or more BANEMs. In one embodiment, the BANEM comprises an RNA. In one embodiment, the BANEM comprises a therapeutic RNA. In one embodiment, the BANEM comprises an mRNA. In one embodiment, the BANEM comprises an siRNA. In one embodiment, the BANEM comprises an shRNA. In one embodiment, the BANEM comprises miRNA. In one embodiment, the BANEM comprises an shRNA. In one embodiment, the BANEM comprises piRNA. In one embodiment, the BANEM comprises an shRNA. In one embodiment, the BANEM comprises snoRNA. In one embodiment, the BANEM comprises an shRNA. In one embodiment, the BANEM comprises tsRNA. In one embodiment, the BANEM comprises an shRNA. In one embodiment, the BANEM comprises srRNA. In one embodiment, the BANEM comprises an shRNA. In one embodiment, the BANEM comprises a CRISPR single guide RNA sequence (sgRNA). In one embodiment, the BANEM comprises an antisense sequence.

[0126] In some embodiments, the vector encodes an mRNA. In one embodiment, the mRNA is a monocistronic mRNA that comprises only one ORF. In certain embodiments, the monocistronic mRNA encodes a peptide or protein comprising at least one epitope of a selected antigen (e.g., a pathogenic antigen or a tumor associated antigen). In other embodiments, the mRNA is a multicistronic mRNA that comprises two or more ORFs. In one embodiment, the multiecistronic mRNA encodes two or more peptides or proteins that can be the same or different from each other. In one embodiment, each peptide or protein encoded by a multicistronic mRNA comprises at least one epitope of a selected antigen.

[0127] In one embodiment, the vector comprises at least one expression cassette of at least one protein. In one embodiment, the vector comprises a single expression cassette. In one embodiment, the vector comprises single expression cassette of a single protein. In one embodiment, the vector comprises single expression cassette of a single monoclonal antibody (mAb). In one embodiment, the vector comprises two expression cassettes of a single protein. In one embodiment, the vector comprises two expression cassettes of a single mAb. In one embodiment, the vector comprises two expression cassettes of two therapeutic genes.

[0128] In some embodiments, the composition comprises one or more vectors. In one embodiment, each vector encodes one antibody. In one embodiment, the vector encodes two antibodies. In one embodiment, the vector encodes three antibodies. In one embodiment, the vector encodes four antibodies. In one embodiment, the vector encodes five antibodies. In one embodiment, the vector encodes six antibodies. In one embodiment, the vector encodes seven antibodies. In one embodiment, the vector encodes eight antibodies. In one embodiment, the vector encodes nine antibodies. In one embodiment, the vector encodes ten antibodies. In one embodiment, the vector encodes eleven antibodies. In one embodiment, the vector encodes twelve or more antibodies.

[0129] In some embodiments, the composition comprises one or more vectors. In some embodiments, the composition comprises two vectors, and each vector encodes one antibody. In some embodiments, the composition comprises one or more vectors. In some embodiments, the composition comprises two vectors, and each vector encodes two antibodies. In some embodiments, the composition comprises two vectors, and each vector encodes three antibodies. In some embodiments, the composition comprises two vectors, and each vector encodes four antibodies. As described herein, a vector encoding an antibody (or antigen binding fragment thereof) can encode both the heavy chain and light chain of the antibody (or variable regions of the heavy and light chains.)

[0130] In one embodiment, the vector comprises at least one expression cassette of at least one protein. In some embodiments, the at least one protein encoded by the nucleic acid molecule in the composition is responsible for lipid metabolism in the subject. In some embodiments, the at least one protein is responsible for lipid synthesis. In some embodiments, the at least one protein is responsible for lipid transportation. In some embodiments, the at least one protein is responsible for lipid storage. In some embodiments, the at least one protein is responsible for lipid degradation or consumption. In some embodiments, the at least one protein in an enzyme catalyzing one or more of the lipid biosynthesis, transportation and/or degradation pathways in the subject.

[0131] In some embodiments, the at least one protein encoded by the nucleic acid molecule in the composition is responsible for fat metabolism in the subject. In some embodiments, the at least one protein is responsible for fat synthesis. In some embodiments, the at least one protein is responsible for fat transportation. In some embodiments, the at least one protein is responsible for fat storage. In some embodiments, the at least one protein is responsible for fat degradation or consumption. In some embodiments, the at least one protein in an enzyme catalyzing the fat biosynthesis, transportation and/or degradation pathways in the subject.

[0132] In specific embodiment, the at least one protein comprises glycosidase. In specific embodiment, the at least one protein comprises galactosidase. In specific embodiment, the at least one protein comprises beta-galactosidase. In specific embodiment, the at least one protein comprises alpha-galactosidase. In specific embodiment, the at least one protein comprises a mixture of alpha-galactosidase and beta-galactosidase. In specific embodiment, the at least one protein comprises a glucocerebrosidase. In specific embodiment, the at least one protein comprises a beta-glucocerebrosidase. In specific embodiment, the at least one protein comprises sulfatase enzymes. In specific embodiment, the at least one protein comprises formylglycine-generating enzymes. In specific embodiment, the at least one protein comprises ceramidase. In specific embodiment, the at least one protein comprises acid ceramidase. In specific embodiment, the at least one protein comprises neutral ceramidase. In specific embodiment, the at least one protein comprises alkaline ceramidase 1, alkaline ceramidase 2, or alkaline ceramidase 3. In specific embodiment, the at least one protein comprises lipase. In specific embodiment, the at least one protein comprises pancreatic lipase. In specific embodiment, the at least one protein comprises hepatic lipase. In specific embodiment, the at least one protein comprises pharyngeal lipase. In specific embodiment, the at least one protein comprises alpha-N-acetylgalactosaminidase (other names: alpha-NAGA or alpha-galactosidase B). In specific embodiment, the at least one protein comprises alpha-L-fucosidase. In specific embodiment, the at least one protein comprises acid alpha-glucosidase (other names: alpha-1,4-glucosidase, acid maltase).

[0133] In some embodiments, the at least one protein is a galactosidase or glycosidase. In some embodiments, the at least one protein is selected from alpha-galactosidase A (GLA), GBA (beta-glucocerebrosidase), FGE (formylglycine-generating enzyme), ASAH (acid ceramidase), SMPD1 (sphingomyelin phosphodiesterase 1) or NPC1 (Niemann-Pick C1 cholesterol transporter) or NPC2 (Niemann-Pick C2 cholesterol transporter), and LAL. In some embodiments, the at least one protein is a lipase. In some embodiments, the at least one protein is a phospholipase.

[0134] In some embodiments, the at least one protein encoded by the nucleic acid molecule in the composition comprises an antibody or an antigen binding portion of an antibody that target a pathogenic antigen. In some embodiments, the antibody or antigen binding portion thereof targets an infectious pathogen. In some embodiments, the infectious pathogen is selected from bacteria, virus, fungus, and parasite. In some embodiments, the pathogen is a coronavirus (e.g., SARS, SARS-Cov-2, MERS) or influenza. In one embodiment, the pathogen is a SARS. In one embodiment, the pathogen is SARS-Cov-2. In one embodiment, the pathogen is a MERS. In one embodiment, the pathogen is influenza. In one embodiment, the pathogen is influenza A. In one embodiment, the pathogen is influenza B.

[0135] In some embodiment, the antibody or antigen binding portion thereof is an anti-viral antigen or antigen binding portion thereof. In some embodiments, the antibody or antigen binding portion thereof is a neutralizing antibody targeting a virus. In one embodiment, the antibody, or antigen binding portion thereof, is specific for SARS-CoV-2. In one embodiment, the antibody is an anti-CoV-2 monoclonal antibody. In one embodiment, the antibody, or antigen binding portion thereof, is specific for an influenza. In one embodiment, the antibody is an anti-influenza monoclonal antibody. In one embodiment, the antibody is the 5J8 monoclonal antibody. In one embodiment, the antibody, or antigen binding portion thereof, is specific for a cytokine. In one embodiment, the antibody is a humanized monoclonal antibody targeting human interleukin-5 (hIL-5). In one embodiment, the monoclonal antibody is mepolizumab.

[0136] In one embodiment, the at least one protein comprises at least one anti-SARS-CoV-2 monoclonal antibody, or antigen-binding portion thereof. In some embodiment, the anti-SARS-CoV-2 antibody, or antigen-binding portion thereof, comprises at least four, or at least eight, or at least 11, anti-SARS-CoV-2 antibodies and/or antigen-binding portions thereof. In one embodiment, the anti-SARS-CoV-2 comprises four antibodies. In one embodiment, the anti-SARS-CoV-2 comprises five antibodies. In one embodiment, the anti-SARS-CoV-2 comprises six antibodies. In one embodiment, the anti-SARS-CoV-2 comprises seven antibodies. In one embodiment, the anti-SARS-CoV-2 comprises eight antibodies. In one embodiment, the anti-SARS-CoV-2 comprises nine antibodies. In one embodiment, the anti-SARS-CoV-2 comprises ten antibodies. In one embodiment, the anti-SARS-CoV-2 comprises eleven antibodies. In one embodiment, the anti-SARS-CoV-2 comprises twelve antibodies. In specific embodiments, the at least one protein comprises one or more selected from the group consisting of: REGN10933, REGN10987, VIR-7831, LY-CoV1404, LY3853113, Zost 2355K, CV07-209K, C121L, Zost 2504L, CV38-183L, COVA215K, RBD215, CV07-250L, C144L, COVA118L, C135K, and B38.

[0137] In one embodiment, the at least one protein comprises REGN10933. In one embodiment, the at least one protein comprises REGN10987. In one embodiment, the at least one protein comprises VIR-7831. In one embodiment, the protein comprises LY-CoV1404. In one embodiment, the at least one protein comprises LY3853113. In at least one protein embodiment, the at least one protein comprises Zost 2355K. In one embodiment, the at least one protein comprises CV07-209K. In one embodiment, the at least one protein comprises C121L. In one embodiment, the at least one protein comprises Zost 2504L. In one embodiment, the at least one protein comprises CV38-183L. In one embodiment, the at least one protein comprises CV38-183L. In one embodiment, the at least one protein comprises COVA215K. In one embodiment, the at least one protein comprises RBD215. In one embodiment, the at least one protein comprises CV07-250L. In one embodiment, the at least one protein comprises C144L. In one embodiment, the protein comprises COVA118L. In one embodiment, the at least one protein comprises C135K. In one embodiment, the protein comprises B38. In one embodiment, the at least one protein comprises COVA118L. In some embodiments, the at least one protein is one or more selected from Table 5 and Table 7.

[0138] In alternative embodiments, the at least one protein encoded by the nucleic acid molecule in the composition comprises a pathogenic antigen. In particular embodiments, the pathogenic antigen is processed to remove or reduce pathogenicity (i.e., ability to cause a disease or symptom). In some embodiments, the pathogenic antigen retains antigenicity (i.e., ability to illicit immune response targeting the pathogen).

[0139] In some embodiment, the at least one protein encoded by the nucleic acid molecule in the composition is selected from the group consisting of: human growth hormone, G-CSF protein (e.g., human GCSF), erythropoietin, Etanercept, Bevacizumab, Rituximab, Adalimumab, Infliximab, Trastuzumab, Insulin, Insulin glargine, Epoetin alfa, Pegfilgrastim, Ranibizumab, Darbepoetin alfa, Interferon beta-1a, Interferon beta-1a (Rebif), Insulin aspart, Rhu insulin, Octocog alfa, Insulin lispro, Cetuximab, Peginterferon alfa-2a, Interferon beta-1b, Eptacog alfa, Insulin aspart, OnabotulinumtoxinA, Epoetin beta, Rec antihemophilic factor, Filgrastin, Insulin detemir, Natalizumab, Insulin (humulin), ACE2, anti-SARS-CoV-2, anti-flu, anti-HIV and/or anti-malaria, Palivizumab, and a-galactosidase A (GLA) (e.g., human GLA). In some embodiments, the at least one protein comprises human GLA.

[0140] In one embodiment, the at least one protein encoded by the nucleic acid molecule comprises GLA-hyFc (SEQ ID NO:49). In one embodiment, the protein comprises GLA-1×L-hyFc (SEQ ID NO:50). In one embodiment, the protein comprises GLA-2×L-hyFc (SEQ ID NO:51). In one embodiment, the protein comprises GLA-3×L-hyFc (SEQ ID NO:52). In one embodiment, the protein comprises a linker peptide comprising the amino acid sequence of SEQ ID NO:27. In one embodiment, the protein comprises a linker peptide comprising the amino acid sequence of SEQ ID NO:28. In one embodiment, the protein expression level is affected by the length of the linker. In one embodiment, longer linker improves the expression level of protein.

[0141] In some embodiments, the at least one protein encoded by the nucleic acid molecule in the composition comprises an antibody or an antigen binding portion of an antibody that targets an antigen associated with a diseased cell. In some embodiments, the at least one protein encoded by the nucleic acid molecule in the composition comprises an antibody or an antigen binding portion of an antibody listed in Column A of Table 4. In alternative embodiments, the at least one protein encoded by the nucleic acid molecule in the composition comprises an antigen associated with a diseased cell. In some embodiments, the at least one protein encoded by the nucleic acid molecule in the composition comprises a disease associated antigen listed in Column E of Table 4. In some embodiments, the antigen associated with the diseased cell is an antigen associated with a cancerous cell, such as a tumor cell. In some embodiments, the antigen that is targeted by the antibody or antigen binding portion thereof encoded by the nucleic acid in the composition is a tumor associated antigen. In some embodiments, the antigen that is encoded by the nucleic acid in the composition is a tumor associated antigen.

[0142] In specific embodiments, the at least one protein encoded comprises a linker peptide. In specific embodiment, the linker is 1× linker. In specific embodiment, the linker is a 2× linker. In specific embodiment, the linker comprises a sequence as set forth in SEQ ID NO: 27 or SEQ ID NO: 28.

[0143] In some embodiments, the vector further comprises one or more non-coding sequences. In one embodiment, the vector comprises an enhancer. In one embodiment, the enhancer is a murine CMV enhancer (M-CmvEnh) listed in Table 3B. In one embodiment, the enhancer is a human CMV enhancer (H-CmvEnh) listed in Table 3B. In some embodiment, the super-enhancer is selected from the enhancer sequences of hr3, SE1, SE2, SE3, SE4 or SE5 listed in Table 3B. In one embodiment, the plasmid comprises a super-enhancer.

[0144] In one embodiment, the vector comprises a promoter. In one embodiment, the promoter is selected from the promoter sequences of H-CMV, H-FerH, M-FABP2, H-CBOX1, H-REG1 and H-TDOX listed in Table 3B.

[0145] In one embodiment, the vector comprises at least one Matrix Attachment Region (MAR). In some embodiments, the MAR is selected from the MAR sequences of βGlo MAR and IFNβ S/MAR listed in Table 3B.

[0146] In one embodiment, the vector comprises a long terminal repeat (LTR). In some embodiments, the LTR is within an intron. In one embodiment, the LTR is selected from the LTR sequences of PPRV, MV, SNV and RU5 listed in Table 3B.

[0147] In one embodiment, the vector comprises a Nuclear Localization Sequence (NLS). In some embodiments, the vector comprises a MicroTubule-Associated Sequence (MTAS). In one embodiment, the plasmid comprises an NLS-MTAS as listed in Table 3B.

[0148] In specific embodiment, the vector comprises an enhancer. In specific embodiment, the enhancer comprises a sequence as set forth in SEQ ID NO: 16 or SEQ ID NO: 17. In specific embodiment, the vector as used herein comprises a promoter. In specific embodiment, the promoter comprises a sequence as set forth in SEQ ID NO: 18, SEQ ID NO: 19, SEQ ID NO: 20, SEQ ID NO: 21, SEQ ID NO: 22, SEQ ID NO: 23, SEQ ID NO: 24, SEQ ID NO: 25 or SEQ ID NO: 26. In specific embodiment, the vector as used herein comprises a matrix-attachment region (MAR). In specific embodiment, the MAR comprises a sequence as set forth in SEQ ID NO: 29, SEQ ID NO: 30 or SEQ ID NO: 31. In specific embodiment, the vector as used herein comprises a super-enhancer. In specific embodiment, the super-enhancer comprises a sequence as set forth in SEQ ID NO: 32, SEQ ID NO: 33, SEQ ID NO: 34, SEQ ID NO: 35, SEQ ID NO: 36 or SEQ ID NO: 37. In specific embodiment, the vector as used herein comprises a long-term repeat (LTR) within intron. In specific embodiment, the LTR comprises a sequence as set forth in SEQ ID NO: 38, SEQ ID NO: 39, SEQ ID NO: 40 or SEQ ID NO: 41. In specific embodiment, the vector as used herein comprises a nucleus localization sequence-microtubule-associated sequence (NLS-MTAS). In specific embodiment, the NLS-MTAS further comprises a hydrophilic linker and modified neck domain peptide (NDP). In specific embodiment, the NLS-MTAS comprises a sequence as set forth in SEQ ID NO: 42, SEQ ID NO: 43, SEQ ID NO: 44 or SEQ ID NO: 45.

[0149] In one embodiment, the nucleic acid sequence or vector is CPG-free. In one embodiment, the nucleic acid sequence or vector is CPG-reduced. In some embodiments, the present disclosure employs CpG-reduced or CpG-free nucleic acid sequences and/or expression vectors. An initial sequence that contains CpG dinucleotides (e.g., wild-type version of an anti-SARS-CoV-2 antibody), may be modified to remove CpG dinucleotides by altering the nucleic acid sequence. Such CpG di-nucleotides can be suitably reduced or eliminated not just in a coding sequence, but also in the non-coding sequences, including, e.g., 5′ and 3′ untranslated regions (UTRs), promoter, enhancer, polyA, ITRs, introns, and any other sequences present in the nucleic acid molecule or vector. CpG di-nucleotides may be located within a codon triplet for a selected amino acid. There are five amino acids (serine, proline, threonine, alanine, and arginine) that have one or more codon triplets that contain a CpG di-nucleotide. All five of these amino acids have alternative codons not containing a CpG di-nucleotide that can be changed to, to avoid the CpG but still code for the same amino acid as shown in Table 1 below. Therefore, the CpG di-nucleotides allocated within a codon triplet for a selected amino acid may be changed to a codon triplet for the same amino acid lacking a CpG di-nucleotide.

[0150] In one embodiment, 0.05-60 mg/mL of the vectors are present in the composition. In one embodiment, 0.05-0.5 mg/mL of the vectors are present in the composition. In one embodiment, 0.5-1 mg/mL of the vectors are present in the composition. In one embodiment, 1-10 mg/mL of the vectors are present in the composition. In one embodiment, 10-20 mg/mL of the vectors are present in the composition. In one embodiment, 20-30 mg/mL of the vectors are present in the composition. In one embodiment, 30-40 mg/mL of the vectors are present in the composition. In one embodiment, 40-50 mg/mL of the vectors are present in the composition. In one embodiment, 50-60 mg/mL of the vectors are present in the composition.

[0151] In one embodiment, the composition comprising a nucleic acid sequence encoding a protein or other BANEM is free of any reagents that serve as aids to transfection. In one embodiment, the composition is free of any reagents that serve as aids to transfection (e.g., the composition comprises water and the nucleic acid sequence or vector containing the nucleic acid sequence, and no other ingredients or only inert other ingredients).

[0152] In one embodiment, the composition comprising a nucleic acid sequence encoding a protein or other BANEM is free of transfection agents. In one embodiment, the composition is free of viral transfection agents. In one embodiment, the composition is free of non-viral transfection agents. In one embodiment, the composition is free of chemical-based transfection agents, such as cationic polymers. In one embodiment, the composition is free of DNA transfection agents. In one embodiment, the composition is free of RNA transfection agents.

[0153] In one embodiment, the composition comprising a nucleic acid sequence encoding a protein or other BANEM further comprises one or more carriers, excipients, or diluents.

[0154] In some embodiments, the composition further comprises a sugar. In some embodiments, the sugar is selected from glucose, mannose, and dextrins. In some embodiments, the composition further comprises water for injection.

[0155] In some embodiments, the composition comprises a saline solution. In one embodiment, the composition comprises hypertonic saline. In one embodiment, the composition comprises the nucleic acid molecule dissolved in a Ringer's solution. In one embodiment, the composition comprises the nucleic acid molecule dissolved in a Lactated Ringer's solution. In one embodiment, the composition comprises the nucleic acid molecule dissolved in a hypotonic Ringer's solution. In one embodiment, the composition comprises the nucleic acid molecule dissolved in a hypotonic Lactated Ringer's solution.

[0156] In one embodiment, the composition comprises a hypertonic saline. In one embodiment, the composition comprises 3% (w/w) hypertonic saline. In one embodiment, the composition comprises 4% (w/w) hypertonic saline. In one embodiment, the composition comprises 5% (w/w) hypertonic saline. In one embodiment, the composition comprises 6% (w/w) hypertonic saline. In one embodiment, the composition comprises 7% (w/w) hypertonic saline. In one embodiment, the composition comprises 3% (w/w) hypertonic Ringer's solution. In one embodiment, the composition comprises 4% (w/w) hypertonic Ringer's solution. In one embodiment, the composition comprises 5% (w/w) hypertonic Ringer's solution. In one embodiment, the composition comprises 6% (w/w) hypertonic Ringer's solution. In one embodiment, the composition comprises 7% (w/w) hypertonic Ringer's solution. In one embodiment, the hypertonic solution is a 2× isotonic Ringer's solution, 2.5× isotonic Ringer's solution, 3× isotonic Ringer's solution, 4× isotonic Ringer's solution, 5× isotonic Ringer's solution, 6× isotonic Ringer's solution, or 7× isotonic Ringer's solution.

[0157] In one embodiment, the composition comprising a nucleic acid sequence encoding a protein or other BANEM further comprises a second active ingredient. In alternative embodiments, the composition comprising a nucleic acid sequence encoding a protein or other BANEM is used in combination with a second composition (e.g., a pre-treatment composition as described herein) comprising a second active ingredient. In some embodiments, the second active ingredient aids expression of the nucleic acid encoding the protein or other BANEM in the composition. In some embodiments, the second active ingredient reduces degradation of the nucleic acid encoding the protein or other BANEM in the composition. In some embodiments, the second active ingredient increases transportation of the nucleic acid encoding the protein or other BANEM into the cells. In some the second active ingredient increases permeability of cell membranes. In some embodiments, the second active ingredient is an anti-inflammation agent. In specific embodiments, the second ingredient is selected from lipids, dexamethasone, hyaluronidase, chloroquine, and TGF-β3.

[0158] In specific embodiments, the composition comprising a nucleic acid sequence encoding a protein or other BANEM further comprises hyaluronidase. In specific embodiments, hyaluronidase is comprised in the composition in the amount of at least 10 units, at least 20 units, at least 30 units, at least 40 units, at least 50 units, at least 60 units, at least 70 units, at least 80 units, at least 90 units, at least 100 units, at least 120 units, at least 140 units, at least 150 units, at least 200 units, or at least 300 units.

[0159] Methods of Administration

[0160] In one embodiment, provided herein is a method comprising: treating a subject, and/or the subject's subcutaneous pre-adipocytes and/or adipocytes, with a composition, wherein the composition comprises, or consists essentially of, a nucleic acid sequence, or a vector containing the nucleic acid sequence, wherein the nucleic acid sequence encodes at least one protein (e.g., one, two, three, four, five, six, or more proteins), or at least one biologically active nucleic acid molecule (e.g., one, two, three, four, five, six, or more biologically active nucleic acid molecules), and wherein the treating comprises at least one of the following:

[0161] a) injecting the composition into one or more subcutaneous regions of the subject (e.g., fat pad, buttocks, stomach, etc.) such that the at least one protein, or the at least one biologically active nucleic acid encoded molecule, is detectable in a blood, serum, or plasma sample from the subject; and/or

[0162] b) injecting the composition into one or more subcutaneous regions of the subject such that a plurality of in-vivo transfected pre-adipocytes and/or adipocytes are generated in the subcutaneous region(s);

[0163] c) performing the following:
[0164] i) contacting a plurality of the pre-adipocytes and/or adipocytes from the subject ex-vivo with the composition such that a plurality of ex-vivo transfected pre-adipocytes and/or adipocytes are generated, and
[0165] ii) injecting at least some of the plurality of ex-vivo transfected pre-adipocytes and/or adipocytes into one or more subcutaneous regions of the subject; and/or

[0166] d) implanting a solid medium carrying the composition into one or more subcutaneous regions of the subject.

[0167] In one embodiment, provided herein is a method comprising: treating a subject, and/or the subject's subcutaneous pre-adipocytes and/or adipocytes, with a composition, wherein the composition comprises, or consists essentially of, a nucleic acid sequence, or a vector containing the nucleic acid sequence, wherein the nucleic acid sequence encodes at least one protein (e.g., one, two, three, four, five, six, or more proteins), or at least one biologically active nucleic acid molecule (e.g., one, two, three, four, five, six, or more biologically active nucleic acid molecules), and wherein the treating comprises injecting the composition into one or more subcutaneous regions of the subject (e.g., fat pad, buttocks, stomach, etc.) such that the at least one protein, or the at least one biologically active nucleic acid encoded molecule, is detectable in a blood, serum, or plasma sample from the subject.

[0168] In one embodiment, provided herein is a method comprising: treating a subject, and/or the subject's subcutaneous pre-adipocytes and/or adipocytes, with a composition, wherein the composition comprises, or consists essentially of, a nucleic acid sequence, or a vector containing the nucleic acid sequence, wherein the nucleic acid sequence encodes at least one protein (e.g., one, two, three, four, five, six, or more proteins), or at least one biologically active nucleic acid molecule (e.g., one, two, three, four, five, six, or more biologically active nucleic acid molecules), and wherein the treating comprises injecting the composition into one or more subcutaneous regions of the subject such that a plurality of in-vivo transfected pre-adipocytes and/or adipocytes are generated in the subcutaneous region(s).

[0169] In one embodiment, provided herein is a method comprising: treating a subject, and/or the subject's subcutaneous pre-adipocytes and/or adipocytes, with a composition, wherein the composition comprises, or consists essentially of, a nucleic acid sequence, or a vector containing the nucleic acid sequence, wherein the nucleic acid sequence encodes at least one protein (e.g., one, two, three, four, five, six, or more proteins), or at least one biologically active nucleic acid molecule (e.g., one, two, three, four, five, six, or more biologically active nucleic acid molecules), and wherein the treating comprises:

[0170] i) contacting a plurality of the pre-adipocytes and/or adipocytes from the subject ex-vivo with the composition such that a plurality of ex-vivo transfected pre-adipocytes and/or adipocytes are generated, and

[0171] ii) injecting at least some of the plurality of ex-vivo transfected pre-adipocytes and/or adipocytes into one or more subcutaneous regions of the subject.

[0172] In one embodiment, the method comprises the injection of ex-vivo transfected pre-adipocytes or adipocytes into a subject. In one embodiment, the method further comprises the use of ex-vivo transfected pre-adipocytes or adipocytes as cell therapies. In some embodiments, the pre-adipocytes or adipocytes are isolated from a subject, ex-vivo transfected and then transferred back to the same subject. In alternative embodiments, the pre-adipocytes or adipocytes are isolated from a donor subject, ex-vivo transfected, and then transferred to a different recipient subject.

[0173] In one embodiment, the ex-vivo transfected pre-adipocytes and/or adipocytes are enlarged such that, on average, they contain at least 60 pg of lipid (e.g., at least 60 . . . 70 . . . 90 . . . 100 . . . 110 ug . . . etc.). In further embodiments, the plurality of the ex-vivo transfected pre-adipocytes and/or adipocytes are enlarged such that, on average, they contain at least 80 ug of lipid (e.g., at least 90 . . . 100 . . . 110 ug . . . etc.). In further embodiments, the plurality of the ex-vivo transfected pre-adipocytes and/or adipocytes are enlarged such that, on average, they have a diameter of at least 70 μm (e.g., at least 70 . . . 80 . . . 90 . . . 100 . . . 110 μm). In additional embodiments, the plurality of the ex-vivo transfected pre-adipocytes and/or adipocytes are enlarged such that, on average, they have a diameter of at least 90 μm (e.g., at least 90 . . . 100 . . . 110 . . . 120 μm).

[0174] In certain embodiments, the transfected and enlarged adipocytes contain, on average, at least 60 μg of lipid (e.g., 60 . . . 70 . . . 80 . . . 90 . . . ug). In some embodiments, the plurality transfected pre-adipocytes and/or adipocytes contain, on average, at least 80 μg of lipid. In other embodiments, the transfected pre-adipocytes and/or adipocytes have, on average, a diameter of at least 70 μm. In additional embodiments, the transfected pre-adipocytes and/or adipocytes have, on average, a diameter of at least 90 μm. In additional embodiments, the transfected pre-adipocytes and/or adipocytes are derived from one or more subcutaneous regions of a subject.

[0175] In one embodiment, the plurality of ex-vivo transfected pre-adipocytes and/or adipocytes are enlarged such that, on average, they contain at least 60 μg of lipid. In one embodiment, they contain at least 65 μg of lipid. In one embodiment, they contain at least 70 μg of lipid. In one embodiment, they contain at least 70 μg of lipid. In one embodiment, they contain at least 75 μg of lipid. In one embodiment, they contain at least 80 μg of lipid. In one embodiment, they contain at least 85 μg of lipid. In one embodiment, they contain at least 90 μg of lipid. In one embodiment, they contain at least 95 μg of lipid. In one embodiment, they contain at least 100 μg of lipid. In one embodiment, they contain at least 110 μg of lipid. In one embodiment, they contain at least 120 μg of lipid. In one embodiment, they contain at least 130 μg of lipid. In one embodiment, they contain at least 150 μg of lipid. In one embodiment, they contain at least 200 μg of lipid.

[0176] In one embodiment, the plurality of ex-vivo transfected pre-adipocytes and/or adipocytes are enlarged such that, on average, they have a diameter of at least 70 μm. In one embodiment, they have a diameter of at least 75 μm. In one embodiment, they have a diameter of at least 80 μm. In one embodiment, they have a diameter of at least 85 μm. In one embodiment, they have a diameter of at least 90 μm. In one embodiment, they have a diameter of at least 95 μm. In one embodiment, they have a diameter of at least 100 μm. In one embodiment, they have a diameter of at least 120 μm. In one embodiment, they have a diameter of at least 150 μm. In one embodiment, they have a diameter of at least 200 μm. In one embodiment, they have a diameter of at least 250 μm.

[0177] In one embodiment, the plurality of ex-vivo transfected pre-adipocytes and/or adipocytes are enlarged such that, on average, they have a diameter of at least 90 μm.

[0178] In one embodiment, the ex-vivo transfected pre-adipocytes and/or adipocytes have normal sizes.

[0179] In one embodiment, provided herein is a method comprising: treating a subject, and/or the subject's subcutaneous pre-adipocytes and/or adipocytes, with a composition, wherein the composition comprises, or consists essentially of, a nucleic acid sequence, or a vector containing the nucleic acid sequence, wherein the nucleic acid sequence encodes at least one protein (e.g., one, two, three, four, five, six, or more proteins), or at least one biologically active nucleic acid molecule (e.g., one, two, three, four, five, six, or more biologically active nucleic acid molecules), and wherein the treating comprises implanting a solid medium carrying the composition into one or more subcutaneous regions of the subject.

[0180] In some embodiments, the treating comprises implanting a solid medium carrying the composition into one or more subcutaneous regions of the subject, and wherein the at least one protein, or the at least one biologically active nucleic acid encoded molecule, is detectable in a blood, serum, or plasma sample from the subject. In some embodiments, the treating comprises implanting a solid medium carrying the composition into one or more subcutaneous regions of the subject, and wherein a plurality of in-vivo transfected pre-adipocytes and/or adipocytes are generated in the subcutaneous region(s).

[0181] In some embodiments, the implanting is performed via an incision surgery. In some embodiments, the solid medium carrying the composition is a biocompatible membrane. In some embodiments, the solid medium carrying the composition is a biocompatible hydrogel. In some embodiments, the solid medium carrying the composition comprises nanoparticles. In some embodiments, the solid medium carrying the composition is configured for slow release of the composition at the site of implantation. In some embodiments, the site of implantation comprises at least one fat tissue. In some embodiments, the site of implantation comprises at least one fat cell. In some embodiments, the site of implantation comprises at least one pre-adipocyte. In some embodiments, the site of implantation comprises at least one adipocyte.

[0182] According to the present disclosure, the injecting in a), b), or c) ii) or the implanting in d) can be performed once or multiple times to a single subject. In one embodiment, the injecting in a), b), or c) ii) or the implanting in d) is performed once. In one embodiment, the injecting in a), b), or c) ii) or the implanting in d) is performed twice. In one embodiment, the injecting in a), b), or c) ii) or the implanting in d) is performed three times. In one embodiment, the injecting in a), b), or c) ii) or the implanting in d) is performed four times. In one embodiment, the injecting in a), b), or c) ii) or the implanting in d) is performed five times. In one embodiment, the injecting in a), b), or c) ii) or the implanting in d) is performed six times. In one embodiment, the injecting in a), b), or c) ii) or the implanting in d) is performed seven times. In one embodiment, the injecting in a), b), or c) ii) or the implanting in d) is performed eight times. In one embodiment, the injecting in a), b), or c) ii) or the implanting in d) is performed nine times. In one embodiment, the injecting in a), b), or c) ii) or the implanting in d) is performed ten times. In one embodiment, the injecting in a), b), or c) ii) or the implanting in d) is performed more than ten times.

[0183] In some embodiments, the injecting in a), b), or c) ii) or the implanting in d) is performed multiple times at a frequency of once per day, or once per every two days, or once per every three days, or once per every four days, or once per every five days, or once per every six days, or once per week, or biweekly, or monthly, or once every two months, or once every three months, or once every four months, or once every five months, or twice a year, or annually, or other repeating frequencies.

[0184] In one embodiment, 1-1000 mg of the vectors are administrated. In one embodiment, 1-50 mg of the vectors are administrated. In one embodiment, 50-100 mg of the vectors are administrated. In one embodiment, 100-200 mg of the vectors are administrated. In one embodiment, 200-300 mg of the vectors are administrated. In one embodiment, 300-400 mg of the vectors are administrated. In one embodiment, 400-500 mg of the vectors are administrated. In one embodiment, 500-600 mg of the vectors are administrated. In one embodiment, 600-700 mg of the vectors are administrated. In one embodiment, 700-800 mg of the vectors are administrated. In one embodiment, 800-900 mg of the vectors are administrated. In one embodiment, 900-1000 mg of the vectors are administrated.

[0185] In one embodiment, a composition comprising the nucleic acid encoding at least one protein or other BANEM or a composition comprising ex-vivo transfected adipocytes or preadipocytes is injected or transplanted subcutaneously to a subject. In some embodiments, the composition is injected or transplanted subcutaneously and become accessible to at least one fat tissue in the subject. In some embodiments, the composition is injected or transplanted subcutaneously and become accessible to a population of preadipocytes in the subject. In some embodiments, the composition is injected or transplanted subcutaneously and become accessible to a population of adipocytes in the subject.

[0186] In one embodiment, the composition comprising the nucleic acid encoding at least one protein or other BANEM or a composition comprising ex-vivo transfected adipocytes or preadipocytes is injected or transplanted into one or more subcutaneous regions of a subject. In one embodiment, the composition is injected or transplanted into two subcutaneous regions. In one embodiment, the composition is injected or transplanted into three subcutaneous regions. In one embodiment, the composition is injected or transplanted into four subcutaneous regions. In one embodiment, the composition is injected or transplanted into five subcutaneous regions. In one embodiment, the composition is injected or transplanted into six subcutaneous regions. In one embodiment, the composition is injected or transplanted into seven subcutaneous regions. In one embodiment, the composition is injected or transplanted into eight or more subcutaneous regions.

[0187] In one embodiment, the subcutaneous region is in a fat pad. In one embodiment, the subcutaneous region is in buttock. In one embodiment, the subcutaneous region is in stomach.

[0188] In one embodiment, the composition is implanted at site of incision. In one embodiment, the incision is at the dermal layer of a subject's skin. In one embodiment, the incision extends beyond the dermal layer of a subject's skin. In one embodiment, the site of incision exposes adipocytes or pre-adipocytes. In one embodiment, the composition contacts the adipocytes or pre-adipocytes at site of incision. In one embodiment, the composition contacts basal cells at site of incision. In one embodiment, the composition contacts melanocytes at site of incision.

[0189] In one embodiment, the injecting in a), b), or c) ii) is into a fat pad of the subject. In one embodiment, the injecting is into a first fat pad of the subject. In one embodiment, the injecting is into a second fat pad of the subject. In one embodiment, the injecting is into a third fat pad of the subject. In one embodiment, the injecting is into a fourth fat pad of the subject. In one embodiment, the injecting is into a fifth fat pad of the subject. In one embodiment, the injecting in a), b), or c) ii) is into the same fat pad of the subject. In one embodiment, the injecting in a), b), or c) ii) is into different fat pads of the subject.

[0190] In one embodiment, the injecting in a), b), or c) ii) or the implantation in d) is performed at a plurality of sites in the subject. In additional embodiments, the injecting in a) and/or b) causes the subject to receive between 1 and 60 micrograms (e.g., 1.0 . . . 10 . . . 20 . . . 30 . . . 40 . . . 50 . . . or 60 micrograms), or between 0.00001 and 1.0 micrograms (e.g., 0.00001 . . . 0.0001 . . . 0.001 . . . 0.01 . . . 0.1 . . . and 1.0 micrograms), per microliter of the composition (e.g., aqueous composition) of the nucleic acid sequence, or the vector containing the nucleic acid sequence.

[0191] In one embodiment, wherein injection in a) and/or b) causes the subject to receive between 1 and 60 micrograms (μg), or between 0.00001 and 1.0 micrograms (μg), per microliter (μL) of the composition of the nucleic acid sequence, or the vector containing the nucleic acid sequence. In one embodiment, the subject receives 1 to 5 μg/μL of nucleic acid in the composition. In one embodiment, the subject receives 0.00001 to 0.0001 μg/μL of nucleic acid in the composition. In one embodiment, the subject receives 0.0001 to 0.001 μg/μL of nucleic acid in the composition. In one embodiment, the subject receives 0.001 to 0.01 μg/μL of nucleic acid in the composition. In one embodiment, the subject receives 0.01 to 0.1 μg/μL of nucleic acid in the composition. In one embodiment, the subject receives 0.1 to 1 μg/μL of nucleic acid in the composition. In one embodiment, the subject receives 1 to 5 μg/μL of nucleic acid in the composition. In one embodiment, the subject receives 5 to 10 μg/μL of nucleic acid in the composition. In one embodiment, the subject receives 10 to 15 μg/μL of nucleic acid in the composition. In one embodiment, the subject receives 15 to 20 μg/μL of nucleic acid in the composition. In one embodiment, the subject receives 20 to 25 μg/μL of nucleic acid in the composition. In one embodiment, the subject receives 25 to 30 μg/μL of nucleic acid in the composition. In one embodiment, the subject receives 30 to 35 μg/μL of nucleic acid in the composition. In one embodiment, the subject receives 35 to 40 μg/μL of nucleic acid in the composition. In one embodiment, the subject receives 40 to 45 μg/μL of nucleic acid in the composition. In one embodiment, the subject receives 45 to 50 μg/μL of nucleic acid in the composition. In one embodiment, the subject receives 50 to 60 μg/μL of nucleic acid in the composition. In one embodiment, the subject receives 1 μg/μL of nucleic acid in the composition.

[0192] In one embodiment, the subject receives 2 μg/μL of nucleic acid in the composition. In one embodiment, the subject receives 4 μg/μL of nucleic acid in the composition. In one embodiment, the subject receives 8 μg/μL of nucleic acid in the composition.

[0193] In one embodiment, the injection in a), b), or c) ii) or the implantation of d) is performed at a plurality of sites in the subject. In one embodiment, the injection is performed at a single site in the subject. In one embodiment, the injection is performed at two sites in the subject. In one embodiment, the injection is performed at two sites in the subject.

[0194] Pre-Treatment

[0195] In one embodiment, the methods further comprise one or more pre-treatment process, prior to the injecting in a), b), or c) ii) or the implantation of d).

[0196] In one embodiment, the methods further comprise, prior to the injecting in a), b), or c) ii) or the implantation of d) administering a pre-treatment solution.

[0197] In one embodiment, the pre-treatment solution comprises cationic liposomes. In one embodiment, the pre-treatment solution comprises neutral liposomes. In one embodiment, the pre-treatment solution comprises both cationic liposomes and neutral liposomes. In one embodiment, the liposome comprises Small Unilamellar Vesicles (SUV). In one embodiment, the liposome comprises Multilamellar Vesicles (MLV). In one embodiment, the pre-treatment solution comprises SUV. In one embodiment, the pre-treatment solution comprises MLV. In one embodiment, the pre-treatment solution comprises SUV. In one embodiment, the pre-treatment solution comprises a mixture of SUV and MLV. In one embodiment, the pre-treatment solution comprises a mixture of cationic SUV and neutral MLV. In one embodiment, the pre-treatment solution comprises a mixture of DOTAP SUV and DMPC MLV.

[0198] In one embodiment, the pre-treatment solution comprises a micelle. In one embodiment, the pre-treatment solution comprises an emulsion. In one embodiment, the pre-treatment solution comprises an empty micelle. In one embodiment, the pre-treatment solution comprises an empty emulsion.

[0199] In one embodiment, the pre-treatment solution comprises an anti-inflammatory agent (AIL). In some embodiments, the anti-inflammatory agent is selected from the group consisting of: dexamethasone, dexamethasone palmitate, a dexamethasone fatty acid ester, Docosahexaenoic Acid (DHA), Eicosapenaenoic Acid (EPA), Alpha Linolenic Acid (ALA), Lipoxin A4 (LA4), 15-deoxy-12,14-Prostaglandin J2 (15d), Arachidonic Acid (AA), Docosapentaenoic Acid (DPA), Retinoic Acid (RA), Diallyl Disulfide (DADS), Oleic Acid (OA), Alpha Tocopherol (AT), Sphingosine-1-Phosphate (S-1-P), Palmitoyl Sphingomyelin (SPH), an anti-TNFa antibody or antigen binding fragment thereof, a heparinoid, N-Acetyl-De-O-Sulfated Heparin, Chloroquine, and TGF-β3. In some embodiments, the anti-inflammatory agent is a lymphocyte depletion agent.

[0200] In one embodiment, the pre-treatment solution comprises liposome and anti-inflammatory agent. In one embodiment, the liposome and anti-inflammatory agent are injected together. In one embodiment, the liposome and anti-inflammatory agent are injected separated. In one embodiment, the anti-inflammatory agent is injected before the liposome. In one embodiment, the anti-inflammatory agent is injected after the liposome.

[0201] In one embodiment, the pre-treatment solution comprises Chloroquine.

[0202] In one embodiment, the pre-treatment solution comprises TGF-β3. In some embodiments, the pre-treatment solution comprises at least 10 ng, at least 20 ng, at least 30 ng, at least 40 ng, at least 50 ng, at least 100 ng, at least 150 ng, at least 200 ng, at least 250 ng, at least 300 ng, at least 500 ng TGF-β3.

[0203] In one embodiment, the pre-treatment solution comprises one or more lymphocyte depleting agent. In some embodiments, the lymphocyte depleting agent comprises one or more antibodies. In some embodiments, the lymphocyte depleting agent reduces matured B cell and/or T cell from the subject after administration.

[0204] In one embodiment, the pre-treatment solution comprises dexamethasone and/or dexamethasone palmitate. In one embodiment, the dexamethasone is water-soluble dexamethasone. In one embodiment, the dexamethasone is complexed to cyclodextrin to make it soluble in water. In one embodiment, the dexamethasone palmitate is dexamethasone 21-palmitate. In one embodiment, the dexamethasone palmitate is attached to a liposome. In one embodiment, the dexamethasone 21-palmitate is attached to a liposome. In one embodiment, the dexamethasone 21-palmitate is attached to a cationic liposome. In one embodiment, the dexamethasone 21-palmitate is attached to a neutral liposome. In one embodiment, the pre-treatment solution comprises liposome comprising dexamethasone palmitate. In one embodiment, the pre-treatment solution comprises cationic liposome comprising dexamethasone palmitate.

[0205] In one embodiment, the pre-treatment solution comprises neutral liposome comprising dexamethasone palmitate. In one embodiment, the pre-treatment solution comprises a mixture of cationic liposome comprising dexamethasone palmitate and neutral liposome comprising dexamethasone palmitate. In one embodiment, the pre-treatment solution comprises a mixture of cationic SUV comprising dexamethasone palmitate and neutral MLV comprising dexamethasone palmitate. In one embodiment, the pre-treatment solution comprises a mixture of DOTAP SUV comprising dexamethasone palmitate and DMPC MLV comprising dexamethasone palmitate.

[0206] In one embodiment, the pre-treatment solution is free or essentially free of nucleic acid.

[0207] In one embodiment, the liposome and dexamethasone are injected together. In one embodiment, the liposome and dexamethasone palmitate are injected together. In one embodiment, the liposome and dexamethasone are injected separately. In one embodiment, the dexamethasone is injected before the liposome. In one embodiment, the dexamethasone is injected after the liposome.

[0208] In one embodiment, the administration of the cationic and/or neutral liposomes is performed intravenously or subcutaneously. In one embodiment, the liposomes are administrated intravenously. In one embodiment, the liposomes are administrated subcutaneously. In one embodiment, the liposomes are administrated intranasally. In one embodiment, the liposomes are administrated intraperitoncally. In one embodiment, the liposomes are administrated intramuscularly. In one embodiment, the liposomes are administrated intratracheally. In one embodiment, the liposomes are administrated intradermally,

[0209] In one embodiment, the pre-treatment process further comprises injecting a nucleic acid. In one embodiment, the pre-treatment process further comprises injecting a DNA. In one embodiment, the pre-treatment process further comprises injecting a plasmid DNA. In one embodiment, the pre-treatment process further comprises injecting a nucleic acid intravenously. In one embodiment, the pre-treatment process further comprises injecting a plasmid DNA intravenously.

[0210] In one embodiment, the pre-treatment process comprises injecting a liposome, followed by injecting a nucleic acid. In one embodiment, the pre-treatment process comprises injecting a liposome intravenously, followed by injecting a nucleic acid intravenously. In one embodiment, the pre-treatment process comprises injecting a liposome comprising dexamethasone intravenously, followed by injecting a nucleic acid intravenously. In one embodiment, the pre-treatment process comprises injecting a mixture of cationic liposome comprising dexamethasone and a neutral liposome comprising dexamethasone intravenously, followed by injecting a nucleic acid intravenously.

[0211] In some embodiments, an agent, such as an anti-inflammatory agent or bioactive lipid, is used to increase the expression level and/or duration of any the therapeutic protein (or biologically active nucleic acid molecules) expressed from the vectors in the methods herein. In certain embodiments, anti-inflammatory agents (AILs) and bioactive lipids in Table 6 below can be used in the compositions and pre-treatment solutions herein. In some embodiments, the anti-inflammatory agent is selected from the group consisting of: dexamethasone, dexamethasone palmitate, a dexamethasone fatty acid ester, Docosahexaenoic Acid (DHA), Eicosapenaenoic Acid (EPA), Alpha Linolenic Acid (ALA), Lipoxin A4 (LA4), 15-deoxy-12,14-Prostaglandin J2 (15d), Arachidonic Acid (AA), Docosapentaenoic Acid (DPA), Retinoic Acid (RA), Diallyl Disulfide (DADS), Oleic Acid (OA), Alpha Tocopherol (AT), Sphingosine-1-Phosphate (S-1-P), Palmitoyl Sphingomyelin (SPH), an anti-TNFa antibody or antigen binding fragment thereof, a heparinoid, and N-Acetyl-De-O-Sulfated Heparin. In one embodiment, the anti-inflammatory agent is dexamethasone. In one embodiment, the anti-inflammatory agent is dexamethasone palmitate. In one embodiment, the anti-inflammatory agent is a dexamethasone fatty acid ester. In one embodiment, the anti-inflammatory agent is TGF-β3.

[0212] In certain embodiments, the present disclosure employs polycationic structures (e.g., empty cationic liposomes, empty cationic micelles, or empty cationic emulsions) not containing vector DNA, which are administered to a subject prior to administration of the composition containing the nucleic acid or vector containing the nucleic acid. In certain embodiments, the polycationic structures are cationic lipids and/or are provided as an emulsion. The present disclosure is not limited to the cationic lipids employed, which can be composed, in some embodiments, of one or more of the following: DDAB, dimethyldioctadecyl ammonium bromide; DPTAP (1,2-dipalmitoyl 3-trimethylammonium propane); DHA; prostaglandin, N-[1-(2,3-Dioloyloxy)propyl]-N,N,N-trimethylammonium methylsulfate; 1,2-diacyl-3-trimethylammonium-propanes, (including but not limited to, dioleoyl (DOTAP), dimyristoyl, dipalmitoyl, disearoyl); 1,2-diacyl-3-dimethylammonium-propanes, (including but not limited to, dioleoyl, dimyristoyl, dipalmitoyl, disearoyl) DOTMA, N-[1-[2,3-bis(oleoyloxy)]propyl]-N,N,N-trimethylammoniu-m chloride; DOGS, dioctadecylamidoglycylspermine; DC-cholesterol, 3.beta.-[N—(N′,N′-dimethylaminoethane)carbamoyl]cholesterol; DOSPA, 2,3-dioleoyloxy-N-(2(sperminecarboxamido)-ethyl)-N,N-dimethyl-1-propanami-nium trifluoroacetate; 1,2-diacyl-sn-glycero-3-ethylphosphocholines (including but not limited to dioleoyl (DOEPC), dilauroyl, dimyristoyl, dipalmitoyl, distearoyl, palmitoyl-oleoyl); beta-alanyl cholesterol; CTAB, cetyl trimethyl ammonium bromide; diC14-amidine, N-t-butyl-N′-tetradecyl-3-tetradecylaminopropionamidine; 14Dea2, O,O′-ditetradecanolyl-N-(trimethylammonioacetyl) diethanolamine chloride; DOSPER, 1,3-dioleoyloxy-2-(6-carboxy-spermyl)-propylamide; N,N,N′,N′-tetramethyl-N,N′-bis(2-hydroxylethyl)-2,3-dioleoyloxy-1,4-butan-ediammonium iodide; 1-[2-acyloxy)ethyl]2-alkyl (alkenyl)-3-(2-hydroxyethyl-) imidazolinium chloride derivatives such as 1-[2-(9(Z)-octadecenoyloxy)eth-yl]-2-(8(Z)-heptadecenyl-3-(2-hydroxyethyl)imidazolinium chloride (DOTIM), 1-[2-(hexadecanoyloxy)ethyl]-2-pentadecyl-3-(2-hydroxyethyl)imidazolinium chloride (DPTIM); 1-[2-tetradecanoyloxy)ethyl]-2-tridecyl-3-(2-hydroxyeth-yl)imidazolium chloride (DMTIM) (e.g., as described in Solodin et al. (1995) Biochem. 43:13537-13544, herein incorporated by reference); 2,3-dialkyloxypropyl quaternary ammonium compound derivates, containing a hydroxyalkyl moiety on the quaternary amine, such as 1,2-dioleoyl-3-dimethyl-hydroxyethyl ammonium bromide (DORI); 1,2-dioleyloxypropyl-3-dimethyl-hydroxyethyl ammonium bromide (DORIE); 1,2-dioleyloxypropyl-3-dimethyl-hydroxypropyl ammonium bromide (DORIE-HP), 1,2-dioleyloxypropyl-3-dimethyl-hydroxybutyl ammonium bromide (DORIE-HB); 1,2-dioleyloxypropyl-3-dimethyl-hydroxypentyl ammonium bromide (DORIE-HPe); 1,2-dimyristyloxypropyl-3-dimethyl-hydroxylethyl ammonium bromide (DMRIE); 1,2-dipalmityloxypropyl-3-dimethyl-hydroxyethyl ammonium bromide (DPRIE); 1,2-disteryloxypropyl-3-dimethyl-hydroxyethyl ammonium bromide (DSRIE) (e.g., as described in Felgner et al. (1994) J. Biol. Chem. 269:2550-2561, herein incorporated by reference in its entirety). Many of the above-mentioned lipids are available commercially from, e.g., Avanti Polar Lipids, Inc.; Sigma Chemical Co.; Molecular Probes, Inc.; Northern Lipids, Inc.; Roche Molecular Biochemicals; and Promega Corp.

[0213] In certain embodiments, the neutral lipids employed (e.g., pre-injected prior to any subcutaneous injections) with the methods, compositions, systems, and kits includes diacylglycerophosphorylcholine wherein the acyl chains are generally at least 12 carbons in length (e.g., 12 . . . 14 . . . 20 . . . 24 . . . or more carbons in length) and may contain one or more cis or trans double bonds. Examples of the compounds include, but are not limited to, distearoyl phosphatidyl choline (DSPC), dimyristoyl phosphatidylcholine (DMPC), dipalmitoyl phosphatidylcholine (DPPC), palmitoyl oleoyl phosphatidylcholine (POPC), palmitoyl stearoyl phosphatidylcholine (PSPC), egg phosphatidylcholine (EPC), hydrogenated or non-hydrogenated soya phosphatidylcholine (HSPC), or sunflower phosphatidylcholine.

[0214] In certain embodiments, the neutral lipids include, for example, up to 70 mol diacylglycerophosphorylethanolamine/100 mol phospholipid (e.g., 10/100 mol 25/100 mol . . . 50/100 . . . 70/100 mol). In some embodiments, the diacylglycerophosphorylethanolamine has acyl chains that are generally at least 12 carbons in length (e.g., 12 . . . 14 . . . 20 . . . 24 . . . or more carbons in length), and may contain one or more cis or trans double bonds. Examples of such compounds include, but are not limited to distearoylphosphatidylethanolamine (DSPE), dimyristoylphosphatidylethanolamine (DMPE), dipalmitoylphosphatidylethanolamine (DPPE), palmitoyloleoylphosphatidylethanolamine (POPE), egg phosphatidylethanolamine (EPE), and transphosphatidylated phosphatidylethanolamine (t-EPE), which can be generated from various natural or semisynthetic phosphatidylcholines using phospholipase D.

[0215] In one embodiment, the cationic and neutral lipids (e.g., in the pre-treatment solution) are selected from the group consisting of: distearoyl phosphatidyl choline (DSPC); hydrogenated or non-hydrogenated soya phosphatidylcholine (HSPC); distearoylphosphatidylethanolamine (DSPE); egg phosphatidylcholine (EPC); 1,2-Distearoyl-sn-glycero-3-phospho-rac-glycerol (DSPG); dimyristoyl phosphatidylcholine (DMPC); 1,2-Dimyristoyl-sn-glycero-3-phosphoglycerol (DMPG); 1,2-Dipalmitoyl-sn-glycero-3-phosate (DPPA); trimethylammonium propane lipids; DOTIM (1-[2-9(2)-octadecenoylloxy)ethyl]-2-(8(2)-heptadecenyl)-3-(2-hydroxyethyl) midizolinium chloride) lipids; and mixtures of two or more thereof.

[0216] In one embodiment, the cationic and neutral lipids are selected from the group consisting of: DOTAP (1,2-dioleoyl-3-trimethylammonium-propane); distearoyl phosphatidyl choline (DSPC); hydrogenated or non-hydrogenated soya phosphatidylcholine (HSPC); distearoylphosphatidylethanolamine (DSPE); egg phosphatidylcholine (EPC); 1,2-Distearoyl-sn-glycero-3-phospho-rac-glycerol (DSPG); dimyristoyl phosphatidylcholine (DMPC); 1,2-Dimyristoyl-sn-glycero-3-phosphoglycerol (DMPG); 1,2-Dipalmitoyl-sn-glycero-3-phosphate (DPPA); trimethylammonium propane lipids; DOTIM (1-[2-9(2)-octadecenoylloxy)ethyl]-2-(8(2)-heptadecenyl)-3-(2-hydroxyethyl) midizolinium chloride) lipids; and mixtures of two or more thereof.

[0217] In one embodiment, the lipid comprises DOTAP. In one embodiment, the lipid comprises DMPC.

[0218] In some embodiments, the polycationic structure or cationic liposomes comprise lipids selected from the group consisting of: 1,2-dioleoyl-3-trimethylammonium-propane (DOTAP); 1,2-Dimyristoyl-sn-glycero-3-phosphocholine (DMPC); 1,2-dioleoyl-sn-glycero-3-phospho-L-serine (DOPS); and 1-stearoyl-2-oleoyl-sn-glycero-3-phospho-L-serine.

[0219] In one embodiment, the polycationic structure or cationic liposome further comprises an anti-inflammatory agent. In one embodiment, the polycationic structure or cationic liposome further comprises dexamethasone or dexamethasone palmitate. In one embodiment, the polycationic structure or cationic liposome further comprises dextrose. In one embodiment, the amount of dextrose is 1-20% (w/w). In one embodiment, the amount of dextrose is 1-10% (w/w).

[0220] In one embodiment, the amount of dextrose is 1-5% (w/w). In one embodiment, the amount of dextrose is 5% (w/w).

[0221] In some embodiments, prior to the injecting, the subject is treated with dexamethasone fatty acid ester.

[0222] In some embodiments, the dexamethasone fatty acid ester employed has the following Formula:

[chemical structure]

wherein R¹ is C₅-C₂₃ alkyl or C₅-C₂₃ alkenyl.

[0223] In one embodiment, the dexamethasone fatty acid ester is dexamethasone palmitate. In one embodiment, the dexamethasone fatty acid ester is dexamethasone acetate.

[0224] In one embodiment, the pre-treatment solution comprises water soluble dexamethasone. In one embodiment, the pre-treatment solution comprises dexamethasone-cyclodextrin inclusion complex (see Sigma Aldrich SKU D2915). In one embodiment, the pre-treatment solution comprises dexamethasone sodium phosphate.

[0225] In some embodiments, the subject has lung, cardiovascular, and/or multi-organ inflammation. In some embodiments, the subject is on a ventilator. In some embodiments, the composition further comprises a physiologically tolerable buffer or intravenous solution. In other embodiments, the composition further comprises lactated Ringer's solution or saline solution.

[0226] In one embodiment, the composition further comprises a physiologically tolerable buffer or intravenous solution.

[0227] In some embodiments, prior to the administration of the nucleic acid encoding the at least one protein or the BANEM, the method further comprises administering a solution to the subject comprising liposomes comprising the polycationic structures, wherein the liposomes further comprising one or more macrophage targeting moieties selected from the group consisting of: mannose moieties, maleimide moieties, a folate receptor ligand, folate, folate receptor antibody or fragment thereof, formyl peptide receptor ligands, N-formyl-Met-Leu-Phe, tetrapeptide Thr-Lys-Pro-Arg, galactose, lactobionic acid, a lipid bi-layer integrating peptide and/or a target peptide.

[0228] In some embodiments, a fatty acid ester of dexamethasone is employed. In some embodiments, the fatty acid ester is a C₆-C₂₄ fatty acid ester, such as hexanoate (caproate), heptanoate (enanthate), octanoate (caprylate), nonanoate (pelargonate), decanoate (caprate), undecanoate, dodecanoate (laurate), tetradecanoate (myristate), octadecenoate (stearate), icosanoate (arachidate), docosanoate (behenate), and tetracosanoate (lignocerate). Accordingly, in some embodiments, the compound is selected from dexamethasone caproate, dexamethasone enanthate, dexamethasone caprylate, dexamethasone pelargonate, dexamethasone caprate, dexamethasone undecanoate, dexamethasone laurate, dexamethasone myristate, dexamethasone palmitate, dexamethasone stearate, dexamethasone arachidate, dexamethasone behenate, and dexamethasone lignocerate.

[0229] Therapeutic Use

[0230] In some embodiment, the method is used for treating, managing or preventing a disease, a condition or a symptom in a subject.

[0231] In some embodiments, the method is used for treating, managing or preventing lipid storage disorders. In one embodiment, the method is used for treating, managing or preventing Fabry disease. In one embodiment, the method is used for treating, managing or preventing Gaucher disease. In one embodiment, the method is used for treating, managing or preventing multiple sulfatase deficiency. In one embodiment, the method is used for treating, managing or preventing Farber's lipogranulomatosis. In one embodiment, the method is used for treating, managing or preventing Niemann-Pick disease. In one embodiment, the method is used for treating, managing or preventing Wolman disease. In one embodiment, the method is used for treating, managing or preventing lysosomal storage disorders. In one embodiment, the method is used for treating, managing or preventing Galactosialidosis. In one embodiment, the method is used for treating, managing or preventing Schindler disease. In one embodiment, the method is used for treating Fucosidosis. In one embodiment, the method is used for treating, managing or preventing Pompe disease. In some embodiments, the method is used for treating, managing or preventing Tay-Sachs disease. In some embodiments, the method is used for treating, managing or preventing Sandhoff's disease. In some embodiments, the method is used for treating, managing or preventing metachromatic leukodystrophy. In some embodiments, the method is used for treating, managing or preventing cholesterol ester storage disease. In some embodiments, the method is used for treating, managing or preventing type 2 diabetes. In some embodiments, the method is used for treating, managing or preventing non-alcoholic or alcoholic fatty liver disease. In some embodiments, the method is used for treating, managing or preventing cancers.

[0232] In one embodiment, the method is used for treating, managing or preventing infectious diseases caused by a pathogen. In some embodiments the infectious pathogen is selected from virus, bacteria, fungi or parasite. In one embodiment, the method is used for treating, managing or preventing viral infection. In one embodiment, the method is used for treating, managing or preventing SARS-Cov-2 infection. In one embodiment, the method is used for treating, managing or preventing influenza infection. In one embodiment, the method is used for treating, managing or preventing influenza A infection. In one embodiment, the method is used for treating, managing or preventing influenza B infection.

[0233] In one embodiment, the method is used for treating, managing or preventing a genetic disease. In some embodiments, the method is used for treating, managing or preventing a cancer.

[0234] In other embodiment, the method is used for treating, managing or preventing conditions as listed in column F of Table 4.

[0235] In one embodiment, the subject is a human or livestock. In one embodiment, the subject is a human.

[0236] In one embodiment, the subject is overweight by BMI standards (e.g., a BMI of 25 . . . 27 . . . 29, 30 . . . 35 . . . 40 or more) and/or is overweight or obese (e.g., clinically obese). In some embodiments, the injecting (e.g., with a syringe) in a), b), or c) ii) is into a fat pad of the subject (e.g., a location where millions of pre-adipocytes and/or adipocytes are located).

[0237] In one embodiment, the subject is overweight by BMI standards and/or is clinically obese. In one embodiment, described here in a method of treatment a subject that is overweight.

[0238] In one embodiment, the subject is overweight by BMI standards. In one embodiment, the subject has a BMI of at least 25. In one embodiment, the subject has a BMI of at least 26. In one embodiment, the subject has a BMI of at least 27. In one embodiment, the subject has a BMI of at least 28. In one embodiment, the subject has a BMI of at least 29. In one embodiment, the subject has a BMI of at least 30. In one embodiment, the subject has a BMI of at least 32. In one embodiment, the subject has a BMI of at least 34. In one embodiment, the subject has a BMI of at least 36. In one embodiment, the subject has a BMI of at least 38. In one embodiment, the subject has a BMI of at least 40. In one embodiment, the subject is clinically obese. In one embodiment, the subject is both overweight by BMI standards and clinically obese.

[0239] In one embodiment, the subject has a normal weight by BMI standards. In one embodiment, the subject has a BMI between 18.5 to 25. In one embodiment, the subject has a BMI of 19, 20, 21, 22, 23, 24 or 25. In one embodiment, described here in a method of treatment a subject that is has normal weight.

[0240] In one embodiment, the subject is underweight by BMI standards. In one embodiment, the subject has a BMI lower than 18.5. In one embodiment, described here in a method of treatment a subject that is underweight.

[0241] Effect of Administration

[0242] In some embodiments, upon subcutaneous administration of the composition comprising the nucleic acid encoding at least one protein or other BANEM to a subject, the encoded at least one protein and/or BANEM is expressed in the subject at a therapeutic level for a sustained period of time. In some embodiments, upon administration of the composition comprising the ex-vivo transfected adipocyte and/or pre-adipocyte, the encoded at least one protein and/or BANEM is expressed in the subject at a therapeutic level for a sustained period of time. In some embodiments, the at least one protein and/or BANEM is expressed in the subject at a level sufficient to induce a therapeutic effect in the subject.

[0243] In some embodiments, the encoded protein is expressed in the blood of the subject at a level of at least 50 μg/ml. In one embodiment, the protein is expressed in the blood of the subject at a level of at least 50 ng/ml. In one embodiment, the protein is expressed in the blood of the subject at a level of at least 100 ng/ml.

[0244] In one embodiment, the protein is expressed in the blood of the subject at a level of at least 200 ng/ml. In one embodiment, the protein is expressed in the blood of the subject at a level of at least 300 ng/ml. In one embodiment, the protein is expressed in the blood of the subject at a level of at least 400 ng/ml. In one embodiment, the protein is expressed in the blood of the subject at a level of at least 500 ng/ml. In one embodiment, the protein is expressed in the blood of the subject at a level of at least 600 ng/ml. In one embodiment, the protein is expressed in the blood of the subject at a level of at least 700 ng/ml. In one embodiment, the protein is expressed in the blood of the subject at a level of at least 800 ng/ml. In one embodiment, the protein is expressed in the blood of the subject at a level of at least 900 ng/ml. In one embodiment, the protein is expressed in the blood of the subject at a level of at least 1000 ng/ml. In one embodiment, the protein is expressed in the blood of the subject at a level of at least 1 μg/ml. In one embodiment, the protein is expressed in the blood of the subject at a level of at least 10 μg/ml. In one embodiment, the protein is expressed in the blood of the subject at a level of at least 50 μg/ml. In one embodiment, the protein is expressed in the blood of the subject at a level of at least 100 μg/ml. In one embodiment, the protein is expressed in the blood of the subject at a level of at least 150 μg/ml. In one embodiment, the protein is expressed in the blood of the subject at a level of at least 500 μg/ml. In one embodiment, the protein is expressed in the blood of the subject at a level of at least 800 μg/ml. In one embodiment, the protein is expressed in the blood of the subject at a level of at least 900 μg/ml. In one embodiment, the protein is expressed in the blood of the subject at a level of at least 1 mg/ml. In one embodiment, the protein is expressed in the blood of the subject at a level of at least 2 mg/ml. In one embodiment, the protein is expressed in the blood of the subject at a level of at least 3 mg/ml. In one embodiment, the protein is expressed in the blood of the subject at a level of at least 4 mg/ml. In one embodiment, the protein is expressed in the blood of the subject at a level of at least 5 mg/ml. In one embodiment, the protein is expressed in the blood of the subject at a level of at least 10 mg/ml. In some embodiments, the protein expression level is measured from a blood sample, such as a whole blood sample, a serum sample or a plasma sample taken from the subject.

[0245] In some embodiments, the encoded protein and/or BANEM is expressed in the subject at a therapeutic level for a sustained period of time. In specific embodiments, the encoded protein and/or BANEM is expressed in the subject at a therapeutic level for at least 50, at least 60, at least 70, at least 80, at least 90, at least 100 days, at least 120 days or at least 150 days after receiving the last dose of administration subcutaneously. In some embodiments, the subject is a mouse or a rat. In some embodiments, the encoded protein and/or BANEM is expressed in the subject at a therapeutic level for a period of time equivalent to at least one month, two months, four months, six months, eight months, ten months, twelve months, 2 years, 5 years, a decade or more in human after receiving the last dose of administration subcutaneously.

[0246] In one embodiment, the expression level of protein and/or BANEM is maintained in the subject for at least one month without any further treatment. In one embodiment, the expression level is maintained for at least two months without any further treatment. In one embodiment, the expression level is maintained for at least four months without any further treatment. In one embodiment, the expression level is maintained for at least six months without any further treatment. In one embodiment, the expression level is maintained for at least eight months without any further treatment. In one embodiment, the expression level is maintained for at least ten months without any further treatment. In one embodiment, the expression level is maintained for at least twelve months without any further treatment. In one embodiment, the expression level is maintained for at least 2 years without any further treatment. In one embodiment, the expression level is maintained for at least 4 years without any further treatment. In one embodiment, the expression level is maintained for at least 6 years without any further treatment. In one embodiment, the expression level is maintained for at least 8 years without any further treatment. In one embodiment, the expression level is maintained for at least 10 years without any further treatment.

[0247] In one embodiment, the expression of protein and/or biologically active nucleic acid is detectable in the subject for at least one month without any further treatment. In one embodiment, the expression is detectable for at least two months without any further treatment. In one embodiment, the expression is detectable for at least four months without any further treatment. In one embodiment, the expression is detectable for at least six months without any further treatment. In one embodiment, the expression is detectable for at least eight months without any further treatment. In one embodiment, the expression is detectable for at least ten months without any further treatment. In one embodiment, the expression is detectable for at least twelve months without any further treatment. In one embodiment, the expression is detectable for at least 2 years without any further treatment. In one embodiment, the expression is detectable for at least 4 years without any further treatment. In one embodiment, the expression is detectable for at least 6 years without any further treatment. In one embodiment, the expression is detectable for at least 8 years without any further treatment. In one embodiment, the expression is detectable for at least 10 years without any further treatment.

[0248] In some embodiments, upon administration of the composition comprising the nucleic acid encoding at least one protein or other BANEM in a subject, a plurality of in-vivo transfected pre-adipocytes and/or adipocytes are generated in the subcutaneous region(s) receiving the injection or implantation.

[0249] In one embodiment, in-vivo transfected pre-adipocytes and/or adipocytes are enlarged such that, on average, they contain at least 60 μg of lipid (e.g., at least 60 . . . 70 . . . 90 . . . 100 . . . 110 ug . . . etc.). In further embodiments, the plurality of in-vivo transfected pre-adipocytes and/or adipocytes are enlarged such that, on average, they contain at least 80 ug of lipid (e.g., at least 90 . . . 100 . . . 110 ug . . . etc.). In further embodiments, the plurality of in-vivo transfected pre-adipocytes and/or adipocytes are enlarged such that, on average, they have a diameter of at least 70 μm (e.g., at least 70 . . . 80 . . . 90 . . . 100 . . . 110 μm). In additional embodiments, the plurality of in-vivo transfected pre-adipocytes and/or adipocytes are enlarged such that, on average, they have a diameter of at least 90 μm (e.g., at least 90 . . . 100 . . . 110 . . . 120 μm).

[0250] In certain embodiments, the transfected and enlarged adipocytes contain, on average, at least 60 μg of lipid (e.g., 60 . . . 70 . . . 80 . . . 90 . . . ug). In some embodiments, the plurality transfected pre-adipocytes and/or adipocytes contain, on average, at least 80 μg of lipid. In other embodiments, the transfected pre-adipocytes and/or adipocytes have, on average, a diameter of at least 70 μm. In additional embodiments, the transfected pre-adipocytes and/or adipocytes have, on average, a diameter of at least 90 μm. In additional embodiments, the transfected pre-adipocytes and/or adipocytes are derived from one or more subcutaneous regions of a subject.

[0251] In one embodiment, the plurality of in-vivo transfected pre-adipocytes and/or adipocytes are enlarged such that, on average, they contain at least 60 μg of lipid. In one embodiment, they contain at least 65 μg of lipid. In one embodiment, they contain at least 70 μg of lipid. In one embodiment, they contain at least 70 μg of lipid. In one embodiment, they contain at least 75 μg of lipid. In one embodiment, they contain at least 80 μg of lipid. In one embodiment, they contain at least 85 μg of lipid. In one embodiment, they contain at least 90 μg of lipid. In one embodiment, they contain at least 95 μg of lipid. In one embodiment, they contain at least 100 μg of lipid. In one embodiment, they contain at least 110 μg of lipid. In one embodiment, they contain at least 120 μg of lipid. In one embodiment, they contain at least 130 μg of lipid. In one embodiment, they contain at least 150 μg of lipid. In one embodiment, they contain at least 200 μg of lipid.

[0252] In one embodiment, the plurality of in-vivo transfected pre-adipocytes and/or adipocytes are enlarged such that, on average, they have a diameter of at least 70 μm. In one embodiment, they have a diameter of at least 75 μm. In one embodiment, they have a diameter of at least 80 μm. In one embodiment, they have a diameter of at least 85 μm. In one embodiment, they have a diameter of at least 90 μm. In one embodiment, they have a diameter of at least 95 μm. In one embodiment, they have a diameter of at least 100 μm. In one embodiment, they have a diameter of at least 120 μm. In one embodiment, they have a diameter of at least 150 μm. In one embodiment, they have a diameter of at least 200 μm. In one embodiment, they have a diameter of at least 250 μm.

[0253] In one embodiment, the plurality of in-vivo transfected pre-adipocytes and/or adipocytes are enlarged such that, on average, they have a diameter of at least 90 μm.

[0254] In one embodiment, the in-vivo transfected pre-adipocytes and/or adipocytes have normal sizes.

[0255] In specific embodiments, the encoded protein comprises a therapeutic antibody or antigen-binding portion thereof targeting an pathogenic antigen (e.g., a anti-SARS-CoV-2 antibody), and the expression of such antibody in the subject is at an expression level sufficient to reduce: i) the load of the pathogen in the subject, and/or ii) at least one symptom in the subject caused by the infectious antigen.

[0256] In one embodiment, the expression level of the therapeutic antibody in the subject is greater than 1 Unit/mL. In one embodiment, the expression level is greater than 10 Unit/mL. In one embodiment, the expression level is greater than 10 Unit/mL. In one embodiment, the expression level is greater than 100 Unit/mL. In one embodiment, the expression level is greater than 200 Unit/mL. In one embodiment, the expression level is greater than 500 Unit/mL. In one embodiment, the expression level is greater than 1000 Unit/mL. In one embodiment, the expression level is greater than 2000 Unit/mL.

[0257] In one embodiment, the therapeutic antibody reduces the pathogen load by 10%, 20%, 30%, 40%, 50%, 60%, 70%, 80%, 90%, 95% or 100% in the subject. In one embodiment, the therapeutic antibody reduces the symptom in the subject caused by the pathogenic infection. In one embodiment, the therapeutic antibody reduces risk of hospitalization or death in the subject caused by the pathogen infection.

[0258] In some embodiments, the pathogen is a coronavirus (e.g., the SARS-Cov-2 virus). In one embodiment, the antibody binds to one or more epitopes of the S protein of the coronavirus and inhibits or reduces one or more S protein function or activity. In one embodiment, binding of the S protein to its cellular receptor is reduced or inhibited. In one embodiment, binding of the coronavirus S protein to angiotensin-converting enzyme 2 (ACE2), and/or sugar on the host cell surface is reduced or inhibited. In one embodiment, attachment of the coronavirus with host cells in the subject is reduced or inhibited. In one embodiment, infection of host cells in the subject by the coronavirus is reduced or inhibited. In some embodiments, the antibody reduces the S protein function or activity by 10%, 20%, 30%, 40%, 50%, 60%, 70%, 80%, 90%, 95% or 100%. In one embodiment, the antibody against the coronavirus or cells infected by the coronavirus is produced in the subject. In one embodiment, the antibody specifically binds to one or more epitopes of the N protein of the coronavirus and inhibits or reduces one or more N protein function or activity. In one embodiment, binding of the coronavirus N protein to reproduced viral genomic sequences is reduced or inhibited. In one embodiment, embodiments, reproduction of viable progenies of the coronavirus is reduced or inhibited. In one embodiment, the antibody reduces the function or activity of the virus by 10%, 20%, 30%, 40%, 50%, 60%, 70%, 80%, 90%, 95% or 100%.

### Systems and Kits

[0259] Also provided here are systems and kits comprising: a) a plurality of transfected pre-adipocytes and/or adipocytes (e.g., which are enlarged), wherein each of the plurality of transfected pre-adipocytes and/or adipocytes comprises an exogenous nucleic acid sequence, or a vector containing the nucleic acid sequence, wherein the nucleic acid sequence encodes at least one protein or at least one biologically active nucleic acid molecule, and b) a first container, wherein the plurality of transfected pre-adipocytes and/or adipocytes (e.g., which are enlarged) are present in the first container.

[0260] In one embodiment, the system comprises:
[0261] a) a plurality of transfected and enlarged adipocytes or pre-adipocytes, wherein each of the plurality of transfected and enlarged adipocytes or pre-adipocytes comprises an exogenous nucleic acid sequence, or a vector containing the nucleic acid sequence, wherein the nucleic acid sequence encodes at least one protein or at least one biologically active nucleic acid molecule, and
[0262] b) a first container, wherein the plurality of transfected and enlarged adipocytes or pre-adipocytes are present in the first container.

[0263] In one embodiment, the first container comprises a syringe configured for injecting the plurality of transfected and enlarged adipocytes or pre-adipocytes into a subject subcutaneously. In one embodiment, the adipocytes or pre-adipocytes are enlarged.

[0264] In some embodiments, the systems or kit further comprises: c) a solution comprising at least one of the following: i) cationic liposomes, ii) neutral liposomes, iii) dexamethasone, and iv) dexamethasone palmitate. In one embodiment, the system further comprises cationic liposomes. In one embodiment, the system further comprises neutral liposomes. In one embodiment, the system further comprises dexamethasone. In one embodiment, the system further comprises dexamethasone palmitate. In one embodiment, the system further comprises both cationic liposomes and dexamethasone. In one embodiment, the system further comprises both cationic liposomes and dexamethasone palmitate. In one embodiment, the system further comprises both neutral liposomes and dexamethasone. In one embodiment, the system further comprises both neutral liposomes and dexamethasone palmitate. In one embodiment, the system further comprises cationic liposomes, dexamethasone and dexamethasone palmitate. In one embodiment, the system further comprises neutral liposomes, dexamethasone and dexamethasone palmitate. In one embodiment, the system further comprises cationic liposome, neutral liposomes, and dexamethasone palmitate.

[0265] In embodiment, the systems or kit is used for treating diseases. In embodiment, the systems or kit is used for treating genetic diseases. In embodiment, the systems or kit is used for treating infectious diseases. In embodiment, the systems or kit is used for treating infectious diseases caused by virus, particularly coronavirus. In embodiment, the systems or kit is used for treating diseases caused SARS-Cov-2. In embodiment, the systems or kit is used for treating diseases caused by influenza, particularly influenza A or influenza B. In embodiment, the systems or kit is used for treating lipid storage disorders. In embodiment, the systems or kit is used for treating lysosomal storage disorders. In embodiment, the systems or kit is used for treating Galactosialidosis. In embodiment, the systems or kit is used for treating Fabry disease. In embodiment, the systems or kit is used for treating Gaucher disease. In embodiment, the systems or kit is used for treating multiple sulfatase deficiency. In embodiment, the systems or kit is used for treating Farber's lipogranulomatosis. In embodiment, the systems or kit is used for treating Niemann-Pick disease. In embodiment, the systems or kit is used for treating Wolman disease. In embodiment, the systems or kit is used for treating Schindler disease. In embodiment, the systems or kit is used for treating Fucosidosis. In embodiment, the systems or kit is used for treating Pompe disease.

[0266] In one embodiment, the plurality transfected and enlarged adipocytes or pre-adipocytes contain, on average, at least 60 μg of lipid. In one embodiment, the plurality transfected and enlarged adipocytes or pre-adipocytes contain, on average, at least 70 μg of lipid. In one embodiment, the plurality transfected and enlarged adipocytes or pre-adipocytes contain, on average, at least 80 μg of lipid. In one embodiment, the plurality transfected and enlarged adipocytes or pre-adipocytes contain, on average, at least 90 μg of lipid. In one embodiment, the plurality transfected and enlarged adipocytes or pre-adipocytes contain, on average, at least 100 μg of lipid. In one embodiment, the plurality transfected and enlarged adipocytes or pre-adipocytes contain, on average, at least 120 μg of lipid. In one embodiment, the plurality transfected and enlarged adipocytes or pre-adipocytes contain, on average, at least 140 μg of lipid. In one embodiment, the plurality transfected and enlarged adipocytes or pre-adipocytes contain, on average, at least 160 μg of lipid. In one embodiment, the plurality transfected and enlarged adipocytes or pre-adipocytes contain, on average, at least 180 μg of lipid. In one embodiment, the plurality transfected and enlarged adipocytes or pre-adipocytes contain, on average, at least 200 μg of lipid.

[0267] In one embodiment, the transfected and enlarged adipocytes or pre-adipocytes have, on average, a diameter of at least 70 μm. In one embodiment, the transfected and enlarged adipocytes or pre-adipocytes have, on average, a diameter of at least 80 μm. In one embodiment, the transfected and enlarged adipocytes or pre-adipocytes have, on average, a diameter of at least 90 μm. In one embodiment, the transfected and enlarged adipocytes or pre-adipocytes have, on average, a diameter of at least 100 μm. In one embodiment, the transfected and enlarged adipocytes or pre-adipocytes have, on average, a diameter of at least 120 μm. In one embodiment, the transfected and enlarged adipocytes or pre-adipocytes have, on average, a diameter of at least 140 μm. In one embodiment, the transfected and enlarged adipocytes or pre-adipocytes have, on average, a diameter of at least 160 μm. In one embodiment, the transfected and enlarged adipocytes or pre-adipocytes have, on average, a diameter of at least 180 μm. In one embodiment, the transfected and enlarged adipocytes or pre-adipocytes have, on average, a diameter of at least 200 μm. In one embodiment, the transfected and enlarged adipocytes or pre-adipocytes have, on average, a diameter of at least 250 μm.

[0268] In one embodiment, the transfected and enlarged adipocytes or pre-adipocytes are derived from one or more subcutaneous regions of a subject.

TABLE 1

| | DNA Codons | DNA Codons |
|---|---|---|
| Amino Acid | Containing CpG | Lacking CpG |
| Serine (Ser or S) | TCG | TCT, TCC, TCA, |
| | | AGT, AGC |
| Proline (Pro or P) | CCG | CCT, CCC, CCA, |
| Threonine (Thr or T) | ACG | ACA, ACT, ACC |
| Alanine (Ala or A) | GCG | GCT, GCC, GCA |
| Arginine (Arg or R) | CGT, CGC, | AGA, AGG |
| | CGA, CGG | |

[0269] In addition, within the coding region, the interface between triplets should be taken into consideration. For example, if an amino acid triplet ends in a C-nucleotide which is then followed by an amino acid triplet which can start only with a G-nucleotide (e.g., Valine, Glycine, Glutamic Acid, Alanine, Aspartic Acid), then the triplet for the first amino acid triplet is changed to one which does not end in a C-nucleotide. Methods for making CpG free sequences are shown, for example, in U.S. Pat. No. 7,244,609, which is herein incorporated herein by reference. A commercial service provided by INVIVOGEN is also available to produce CpG free (or reduced) nucleic acid sequences/vectors (plasmids). A commercial service provided by ThermoScientific produces CpG free nucleotide sequences.

[0270] Provided below in Table 2 are exemplary promoters and enhancers that may be used in the vectors described herein. Such promoters, and other promoters known in the art, may be used alone or with any of the enhancers, or enhancers, known in the art. Additionally, when multiple proteins or biologically active nucleic acid molecules (e.g., two, three, four, or more) are expressed from the same vector, the same or different promoters may be used in conjunction with the subject nucleic acid sequence. In some embodiments, a promoter selected from the following list is employed to control the expression levels of the protein or nucleic acid: FerL, FerH, Grp78, hREG1B, and cBOX1. Such promoter can be used, for example, to control production of a protein (e.g., HGH) protein production over a broad temporal range (e.g., without the use of any other modifications including Gene switches).

TABLE 2

| Promoter | Enhancer |
|---|---|
| CMV | human CMV |
| EF1α | mouse CMV |
| Ferritin (Heavy/Light) Chain | SV40 |
| GRP94 | Ubc |
| U1 | AP1 |
| UbC | hr3 |
| Beta Actin | IE2 |
| PGK1 | IE6 |
| GRP78 | E2-RS |
| CAG | MEF2 |
| SV40 | C/EBP |
| TRE | |
| FerL | |
| FerH | |
| Grp78 | |
| hREG1B | |
| cBOX1 | HNF-1 |

[0271] In some embodiments, compositions and systems herein are provided and/or administered (e.g., injected subcutaneously) in doses selected to elicit a therapeutic and/or prophylactic effect in an appropriate subject (e.g., mouse, human, etc.). In some embodiments, a therapeutic dose is provided. In some embodiments, a prophylactic dose is provided. Dosing and administration regimes are tailored by the clinician, or others skilled in the pharmacological arts, based upon well-known pharmacological and therapeutic/prophylactic considerations including, but not limited to, the desired level of pharmacologic effect, the practical level of pharmacologic effect obtainable, toxicity. Generally, it is advisable to follow well-known pharmacological principles for administrating pharmaceutical agents (e.g., it is generally advisable to not change dosages by more than 50% at time and no more than every 3-4 agent half-lives). For compositions that have relatively little or no dose-related toxicity considerations, and where maximum efficacy is desired, doses in excess of the average required dose are not uncommon. This approach to dosing is commonly referred to as the “maximal dose” strategy. In certain embodiments, a dose (e.g., therapeutic of prophylactic) of nucleic acid or vector is about 0.01 mg/kg to about 200 mg/kg (e.g., 0.01 mg/kg, 0.02 mg/kg, 0.05 mg/kg, 0.1 mg/kg, 0.2 mg/kg, 0.5 mg/kg, 1.0 mg/kg, 2.0 mg/kg, 5.0 mg/kg, 10 mg/kg, 20 mg/kg, 50 mg/kg, 100 mg/kg, 200 mg/kg, or any ranges therebetween (e.g., 5.0 mg/kg to 100 mg/kg)). In some embodiments, a subject is between 0.1 kg (e.g., mouse) and 150 kg (e.g., human), for example, 0.1 kg, 0.2 kg, 0.5 kg, 1.0 kg, 2.0 kg, 5.0 kg, 10 kg, 20 kg, 50 kg, 100 kg, 200 kg, or any ranges therebetween (e.g., 40-125 kg). In some embodiments, a dose of nucleic acid, or vector containing the nucleic acid, comprises between 0.001 mg and 40,000 mg (e.g., 0.001 mg, 0.002 mg, 0.005 mg, 0.01 mg, 0.02 mg, 0.05 mg, 0.1 kg, 0.2 mg, 0.5 mg, 1.0 mg, 2.0 mg, 5.0 mg, 10 mg, 20 mg, 50 mg, 100 mg, 200 mg, 500 mg, 1,000 mg, 2,000 mg, 5,000 mg, 10,000 mg, 20,000 mg, 40,000 mg, or ranges therebetween.

[0272] In certain embodiments, a target peptide is used with the cationic or neutral liposomes in the pre-treating solutions herein. Exemplary target peptides are shown in Table 3 below. In table 3, “[n]” prefix indicates the N-terminus and a “[c]” suffix indicates the C-terminus; sequences lacking either are found in the middle of the protein.

TABLE 3A

| Target | Sequence | Source protein or organism |
|---|---|---|
| nucleus (NLS) | PKKKRKV (SEQ ID NO: 1) | SV40 large Tantigen (P03070) |
| Out of nucleus (NES) | IDMLIDLGLDLSD (SEQ ID NO: 2) | HSV transcriptional regulator |
| | | IE63 P10238 |
| ER, secretion (signal | [n]MMSFVSLLLVGILFWATEAEQLTKCE | Lactalbumin (P09462) |
| peptide) | VFQ (SEQ ID NO: 3) | |
| ER, retention (KDEL) | KDEL[c] (SEQ ID NO: 4) | |
| Mitochondrial matrix | [n]MLSLRQSIRFFKPATRTLCSSRYLL | S. cerevisiae COX4 (P04037) |
| | (SEQ ID NO: 5) | |
| Plastid | [n]MVAMAMASLQSSMSSLSLSSNSFLGQ | Pisum sativum RPL24 (P11893) |
| | PLSPITLSPFLQG (SEQ ID NO: 6) | |
| Folded secretion (Tat) | (S/T)RRXFLK (SEQ ID NO: 7)(“X” refers | Near the N terminus^{[6]} |
| | to any naturally occurring amino acid) | |
| peroxisome (PTS1) | SKL[c] (SEQ ID NO: 8) | |
| peroxisome (PTS2) | [c]XXXXRLXXXXXHL (SEQ ID NO: 9) | |
| | (“X” refers to any naturally occurring amino | |
| | acid) | |

[0273] In one embodiment, the vector as used herein comprises at least one sequence as listed in Table 3B below.

[0274] In one embodiment, the vector as used herein comprises an enhancer. In one embodiment, the enhancer comprises a sequence as set forth in SEQ ID NO: 16 or SEQ ID NO: 17.

[0275] In one embodiment, the vector as used herein comprises a promoter. In one embodiment, the promoter comprises a sequence as set forth in SEQ ID NO: 18, SEQ ID NO: 19, SEQ ID NO: 20, SEQ ID NO: 21, SEQ ID NO: 22, SEQ ID NO: 23, SEQ ID NO: 24, SEQ ID NO: 25 or SEQ ID NO: 26.

[0276] In one embodiment, the vector as used herein encodes a linker. In one embodiment, the linker is 1× linker. In one embodiment, the linker is a 2× linker. In one embodiment, the linker comprises a sequence as set forth in SEQ ID NO: 27 or SEQ ID NO: 28.

[0277] In one embodiment, the vector as used herein comprises a matrix-attachment region (MAR). In one embodiment, the MAR comprises a sequence as set forth in SEQ ID NO: 29, SEQ ID NO: 30 or SEQ ID NO: 31.

[0278] In one embodiment, the vector as used herein comprises a super-enhancer. In one embodiment, the super-enhancer comprises a sequence as set forth in SEQ ID NO: 32, SEQ ID NO: 33, SEQ ID NO: 34,

[0279] SEQ ID NO: 35, SEQ ID NO: 36 or SEQ ID NO: 37.

[0280] In one embodiment, the vector as used herein comprises a long-term repeat (LTR) within intron. In one embodiment, the LTR comprises a sequence as set forth in SEQ ID NO: 38, SEQ ID NO: 39, SEQ ID NO: 40 or SEQ ID NO: 41.

[0281] In one embodiment, the vector as used herein comprises a nucleus localization sequence-microtubule-associated sequence (NLS-MTAS). In one embodiment, NLS-MTAS further comprises a hydrophilic linker and modified neck domain peptide (NDP). In one embodiment, the NLS-MTAS comprises a sequence as set forth in SEQ ID NO: 42, SEQ ID NO: 43, SEQ ID NO: 44 or SEQ ID NO: 45.

TABLE 3B

| | |
|---|---|
| SEQUENCE | |
| NAME | |
| (SEQ ID NO) | AMINO ACID OR NUCLEIC ACID SEQUENCE |

Enhancer

| | |
|---|---|
| M-CmvEnh | GAGTCAATGGGAAAAACCCATTGGAGCCAAGTACACTGACTCAATAG |
| (SEQ ID NO: 16) | GGACTTTCCATTGGGTTTTGCCCAGTACATAAGGTCAATAGGGGGTG |
| | AGTCAACAGGAAAGTCCCATTGGAGCCAAGTACATTGAGTCAATAGG |
| | GACTTTCCAATGGGTTTTGCCCAGTACATAAGGTCAATGGGAGGTAA |
| | GCCAATGGGTTTTTCCCATTACTGACATGTATACTGAGTCATTAGGGA |
| | CTTTCCAATGGGTTTTGCCCAGTACATAAGGTCAATAGGGGTGAATC |
| | AACAGGAAAGTCCCATTGGAGCCAAGTACACTGAGTCAATAGGGACT |
| | TTCCATTGGGTTTTGCCCAGTACAAAAGGTCAATAGGGGGTGAGTCA |
| | ATGGGTTTTTCCCATTATTGGCACATACATAAGGTCAATAGGGGTG |
| H-CmvEnh | GTTACATAACTTATGGTAAATGGCCTGCCTGGCTGACTGCCCAATGAC |
| (SEQ ID NO: 17) | CCCTGCCCAATGATGTCAATAATGATGTATGTTCCCATGTAATGCCAA |
| | TAGGGACTTTCCATTGATGTCAATGGGTGGAGTATTTATGGTAACTGC |
| | CCACTTGGCAGTACATCAAGTGTATCATATGCCAAGTATGCCCCCTAT |
| | TGATGTCAATGATGGTAAATGGCCTGCCTGGCATTATGCCCAGTACAT |
| | GACCTTATGGGACTTTCCTACTTGGCAGTACATCTATGTATTAGTCAT |
| | TGCTATTA |

Promoter

| | |
|---|---|
| H-CMV | CCATGGTGATGGGTTTTGGCAGTACATCAATGGGTGTGGATAGTGGT |
| (SEQ ID NO: 18) | TTGACCCATGGGGATTTCCAAGTCTCCACCCCATTGATGCCAATGGGA |
| | GTTTGTTTTGGCACCAAAATCAATGGGACTTTCCAAAATGTTGTAACA |
| | ACTCTGCCCCATTGATGGAAATGGGTGGTAGGTGTGTGTGGTGGGAG |
| | GTCTATATAAGCAGAGCTTGTTTAGTGAACTGGATGCACCTACTA |
| H-FerL from | TCAGGGCCCCAACCCCCCCAAGCCCCCATTTCACAACATGCTGGTGCT |
| pVIVO2, 281 bp: 24 | ACAGGTGTGTGACTTCCCCTTGCTTTGGGGTGGGGGGCTGAGACTCCT |
| TG | ATGTGCTCTGGATTGGTCAGGCATGGCCTTTGGCCCTGCCTCCTGCCA |
| (SEQ ID NO: 19) | CTGCAGATTGGCTGCTAGGCCTCCCTGAGTGCCCTGCCTCTGAGGGCT |
| | GGTGCACCATAAAAGAAGCTGCCCTAGCCATGTCCCCTTGCAGTTTG |
| | GTGGTCCTGTGGGTCTGTCTCAAGCTTGCTGCCAGAACACAG |
| H-FerH from | TTCTGCCAGAGTGTGTGAGGGCCTCCAGTGGCTGCCCCTCCCCCACAG |
| pVIVO2, 182 bp: 26 | CAGGGGTGGGGTCCTGTGCCCACTGGAAGGAGTGGGCTTGGGGTGGG |
| TG | TGGTGCTGATTGGCTGGGGTGGGCCTGATGCTGATGTGGCTATAAGA |
| (SEQ ID NO: 20) | GACCACAAGTGACCTGCAGGGCCAGATGTTCTTTGCTGAA |
| Grp78 from | AGTTACTGGTGGAAATGGTCTTGGGTTGAGAGGTCACCTGAGGGACA |
| pVIVO1, 547 bp: 59 | GGCAGCTGCTGAACCAATAGGACTGGTGCACAGGGTGGATGCTGCCC |
| TG | CTCATTGGTGGCTGTTGAGAGTGACCAAGAGCCAATGAGTCAGCCTG |
| (SEQ ID NO: 21) | GGGGGTGTAGCAGTGATGTAAGTTGTGGAGGAGGCTGCTTTGAATTG |
| | GCAGTGGCCAGCTTGGTGGCATGGACCAATCAGTGTCCTCCAATGAG |
| | GAGTGCCTTTGCCAATTGGAGGCCTCCATGATGGGGCTGGGGGGAGG |
| | GTATATAAGCTGAGTTGGTGGTGGTGTGCTCCACATGGGCTGAGACC |
| | ACAGTGATGGGAGTGTCTGCCTCTGTGGGGCTGAGAGGTAAGTGCTG |
| | TGGCCTGCCCTTTCCAGGCCAACTTGGAGCCTGTCTTGTGGCTCTGCC |
| | TGATTGGGGGCTCCTGTTGCCCTCAGATTGGTTGGAATGCTGTTGTGC |
| | TCTGGGACTACAAGCCTGTTGCTGGGCCTGGAGACTGCTGAAGGACT |
| | GCTGAGCACTGTCCTCAGTGCTGGCAcc |
| M-FABP2 (Murine | GTGCAGTCGACACTGTCTCAAAAACCAAACCAAACCAAAACCCAACC |
| Fatty Acid Binding | CAAACCAAACAAAGCCAAACAACAACAACAAAAACAAAAAAACCCA |
| Protein 2) | CCAAAAAAACCAAGGAAACAAAACAACCAAAAATCAAAAAACTAGG |
| (SEQ ID NO: 22) | CTACTTTAAAATGTCATTATTTATTTTGTTAAAATTCCTGAGATAAAC |
| | ACTATTCTAACAAAAGAGCCATTAAGACTAAGAATCTCTAAGATAGT |
| | TTTTATGTTCTCAAATTCAGAAGAACTAAACACATTATTGCAGTATTA |
| | ATAAAATAAAAACTCAAGATAAGAAGGTCAAATGTGTCCAAGATAAT |
| | TGTCTCCTCCACAATGAGGCAAATCCATAAGGAATAATGGGGGGAAG |
| | TTCAATGCATTAGCTTTTGACAGTCAAAACAGGAACCTTTAAAATACT |
| | CTGTTCATGGTTAAAAATAATTTGTACTCTAAGTCCAGTGATCATTGC |
| | CAGGGAGAACCAAAGTTGAGAAATTTCTATTAAAAACATGACTCAGA |
| | GGAAAACATACAGGGTCTGGTCATGAAGGAAATGATCTGGCCCCCAT |
| | TGGTCACTCCTACAGTCACATGGTCAGGGCATCTTTAAAAGTGAGCT |
| | ATCTGGACTTCAGAGGCTCATAGCACCCTCCTGTGCTGCAGCCTTTCT |
| | CACCTGGAAGATATCTCCTCC |
| M-INB, (Mouse | GCAGCTGTCGACCTGAGTTATATGCACAAGATCCTGGAATATTTTCAT |
| Inteferon B): −807 to | TATCCTGGAGACACTGTGTTACTAATAACTCTGTATTTGTTCCTGCCA |
| +57: PCR = 864 bp | GTACTTACTCTCTCCTGTGGCCCCTCATTGTCCTTGCTCCTTTAGAAGT |
| (SEQ ID NO: 23) | GGCCCAAGTTGGTTTTTCTCACTTCTCAGAGCTCCCTCTTCTGTTGCTT |
| | TGGTGAAGTGCTGGGAAACTTGGCTGCTTCTCTCTCTGTTACCCACTC |
| | ACAACCCTTCCTTCCCTGGTCTCTTGTTTTGACACTGCTCAAACTGGA |
| | CCCCCACTTTAAGCAGTTTCTCCAGGATGTGGGGTTCTCTCCCAAAGG |
| | GAGCTATGGCCCATTGATGTGCCATTTCTCTTATAGTACACTATTGTA |
| | AGCCCCCTGGGAGCTCACAGAGACCCTCTCCCACCATCCCACTATTTC |
| | AAAGGGCAGCAGCTGTGCCATCCTTTCAGGATGAGCAGCTACTCTGC |
| | CTGGCTTTTCAGTGGACACTTTGGCTGTTTGAGAGTTCTTTTATCTTCA |
| | GGGCTGTCTCCTTTCTGTTCTTCTCTCCTGGATATTTCTCTTCCTTTGCT |
| | CCAGCAATTGGTGAAACTGTACAAGATTTTATAAATCCTTAGTTTGTA |
| | TATATTTTAACCCAGTACATAGCATATAAAATAGCCAGGAGCTTGAA |
| | TAAAATGAATATTAGAAGCTGTTAGAATAAGAGAAAATGACAGAGG |
| | AAAACTGAAAGGGAGAACTGAAAGTGGGAAATTCCTCTGAGGCAGA |
| | AAGGACCATCCCTTATAAATAGCACAGGCCATGAAGGAAGATCATTC |
| | TCACTGCAGCCTTTGACAGCCTTTGCCTCATCTTGCAGATATCAGCCG |
| | AC |
| H-CBOX1 (Human | GTCGACACTCTGTCTCAAAAATAATATCAATAGTAATAATGGTAATA |
| Carboxypeptidase | CAAACAAAAATACTGATAAATCTCAAAAACATTATCTTGAATGAAAG |
| B1) | AAGCCAGAAACAAAGGAATATATATTGTATAATCTCATTTACATTAA |
| SEQ ID NO: 24 | GTTTAATACAGGCAAAATTAATGTATAAAGCCAGAAATCAGAGTAAC |
| | ATTTGCCTGAGAGGAGTACAGAAGTAGACTGGAAAAGTGCTCAAGG |
| | GAACTTGTTAGGGTGATGAAAATGTGCTATATCTTGTTTGGGATGTTT |
| | ATTACATGGGTTTACACATTTGTCAAAACTCATCAAACTTTACACTAA |
| | AATCTGTAGAACTTATTGTATGTAATTCTCAATTCAAAACAGAAAAA |
| | AATACAAAATAGATTTTATTTAAATCTAATTTACTCTCAGACTATTCA |
| | AGTTCTGATCCAAATTAAATAAGTTGAATTTGAGAGTATTTACTCTAT |
| | TTCCACAGGTGTTGAGAGAGATACCCTCTCAGACTTTACACAGCTACC |
| | AAGGCAACAATGCCAGGAAAACTATTAATCAAGATATGATAGTTCCT |
| | GTTTGCAATCAGGAGAAGAAAGCAAAGAACACTCAGGATTATAAAA |
| | GCAGATGAGACCTACCCACTAGACCTGGTCAGATATC |
| H-REG1 (Human | GTCGACTCCATGATTGTAAGTTTCCTGAGGCCTCCCCATCCTCAGGAA |
| Regenerating Islet- | AGTCTGTGAGTCAATTAAACTATGAGTCAATTAAACCTCTTTCCTTTT |
| Derived 1B) | TAAGTTACCCAGTCTCTGGTATTATCTTTATAGCAGTATGAAAAGGAC |
| (SEQ ID NO: 25) | TAATACACCTTGCCTTCTGAAGTAGGTCTTGAGAGGTTCCTGAACCTG |
| | AAAGGGAATGGAGAAATGACTTAAAGCCACCAGCTAATTGGGCTTAA |
| | TCATTTGGACTCAGTTGACTCTTCCCCTACCCCTACCCATGCCTAAAC |
| | CAAAGAAAGGATCATCCCACATTTACCTAGCACAAAGAAATCTACTC |
| | TTCTGCTCTTTCTAGGACTGCTAAAGGCCATGGGAACTGGACACCTGG |
| | ATGCTGCAGAGGAAGGGCAAAGCTCAACATCAACTTGGACAGTTTGC |
| | CAACCTGTTTGTGGTAAGTTGATGTCATTTGTGACCACTCCTAATGTG |
| | TGCCAGGAATAAGCTATTCCTGATGCCAGAATCTCTTACTGTCAGTGC |
| | CCTCTGTAGGCCTTCTGATCCTTACTCCTTGCTCCACCCATTGTTTATA |
| | TCATGTAGTTCTCTCTCAGACCCTGATATAAAGCTCCTACTCTGTCTG |
| | ACCTGACAAGCCACCTCAAGTGGACAAGGCACTTACCAACAGGTAAA |
| | GGGGCATTACAGGAGAAGAGGATATCTGAAGCTCGAGGGCTCG |
| H-TDOX (Human | GCTACGTCGACCAGGCTGGTCTTGAACTACTGTTTTAAAATTCTATAT |
| Tryptophan 2, 3 | AGGCAATGTATGCTAATGTGGATGACTGCTAGCTACCCTGTCATTGGT |
| Dioxygenase) | ATGCCACAGATGAATAGTAAACTGATAATGTTCATTTAAATTCCAAT |
| (SEQ ID NO: 26) | ACAATGTGTTGAGAGCTTAACTGCTGCTGATTATTACATGATATTTAG |
| | GTCAGAAGAACTCTGATGATTGAATGGAAGTGGGCTTTGAGCATGTA |
| | CCCAGACTTTATTATACAGTTAATTTCCCTAGAGGTGTTAAATTTCAG |
| | TTTTTGGTCTAGAAGCTGTAAGAATATTCAAATTTGAGAGAATACATA |
| | TTTGTTTTTTACAAGCTCATCATCTTATGTATCCTAATACTATGCCAAA |
| | TGTTTTCTTGGGATTGAATAAATGTAATTTTTTTAACTTGGCCTCTGTT |
| | GATTCATTGGATGTTTGTTACTTTGAATATAAAAGCAGAACTTGGCAA |
| | GTCATACAACTCAATTTGGCAGATCACTCACTCTTAGCAAATGAACTG |
| | TGCCCAACATAAATCCACTCTAAAGTTTACAGAGGTTCAGTTCTGTAC |
| | CAATGGAAATGAGAAGTTAGCTAAGAGTACAAGAAGCATGCTGATTG |
| | GCTGATGCAGGGTAAGCAGGCTACATAAAAGGCAGCTGTAGAACATC |
| | TGGGAAGGTCAATGATATCATCTG |

Linker

| | |
|---|---|
| 1x Linker | GGTGGAGGAGGTAGT |
| (SEQ ID NO: 27) | |
| 2x Linker | GGTGGAGGAGGTAGTGGGGGTGGAGGTTCA |
| (SEQ ID NO: 28) | |

Matrix Attachment Regions (MARs)

| | |
|---|---|
| βGlo MAR | TTAATTAAAATTATCTCTAAGGCATGTGAACTGGCTGTCTTGGTTTTCAT |
| SEQ ID NO: 29 | CTGTACTTCATCTGCTACCTCTGTGACCTGAAACATATTTATAATTCCAT |
| | TAAGCTGTGCATATGATAGATTTATCATATGTATTTTCCTTAAAGGATTTT |
| | TGTAAGAACTAATTGAATTGATACCTGTAAAGTCTTTATCACACTACCC |
| | AATAAATAATAAATCTCTTTGTTCAGCTCTCTGTTTCTATAAATATGTAC |
| | CAGTTTTATTGTTTTTAGTGGTAGTGATTTTATTCTCTTTCTATATATATAC |
| | ACACACATGTGTGCATTCATAAATATATACAATTTTTATGAATAAAAAAT |
| | TATTAGCAATCAATATTGAAAACCACTGATTTTTGTTTATGTGAGCAAA |
| | CAGCAGATTAAAAGG |
| 21421 S/MAR | GAGCCCCACTGTGTTCATCTTACAGATGGAAATACTGACATTCAGAGG |
| (SEQ ID NO: 30) | AGTTAGTTAACTTGCCTAGGTGATTCAGCTAATAAGTGCAAGAAAGAT |
| | TTCAATCCAAGGTGATTTGATTCTGAAGCCTGTGCTAATCACATTACAC |
| | CAAGCTACAACTTCATTTATAAATAATAAGTCAGCTTTCAAGGGCCTTT |
| | CAGGTGTCCTGCACTTCTACAAGCTGTGCCATTTAGTGAACACAAAAT |
| | GAGCCTTCTGATGAAGTAGTCTTTTCATTATTTCAGATATTAGAACACT |
| | AAAATTCTTAGCTGCCAGCTGATTGAAGGCTGGGACAAAATTCAAACA |
| | TGCATCTACAACAATATATATCTCAATGTTAGTCTCCAAATTCTATTGAC |
| | TTCAACTCAAGAGAATATAAAGAGCTAGTCTTTATACACTCTTTAAGGT |
| | ATGATATCATCTGGAAAGTAACAAAATTGATGCAAATTTGAATGAACTT |
| | TATCATGGTGTATTTACACAATGTGTTTCTTCTCCCTGCAATGTATTTCT |
| | TTCTCTAATTCCTTCCATTTGATCTTTCATACACAATCTGGTTCTGATGT |
| | ATGTTTTTTGGATGCACTTTTCAACTCCAAAAGACAGAGCTAGTTACTT |
| | TCTTCCTGGTGCTCCAAGCACTGTATTTGTATCTGTATTCAAGCCCTTT |
| | GCAATATTGTACTGGATCATTATTTCACCTCTAGGATGGCTTCCCCAGG |
| | CAACTTGTGTTCACCCAGAGACTACATTTTGTATCTTGTTGACCTTTGA |
| | ACTTCCACCAGTGTCTAAAAATAATATGTATGCAAAATTACTTGCTATG |
| | AGAATGTATAATTAAACAATATAAAAAGGAGAAGCAAGGAGAGAAAC |
| | ACAGGTGTGTATTTGTGTTTGTGTGCTTAAAAGGCAGTGTGGAAAAGG |
| | AAGAAATGCCATTTATAGTGAGGAGACAAAGTTATATTACCTCTTATCT |
| | GGCTTTTAAGGAGATTTTGCTGAGCTAAAAATCCTATATTCATAGAAAA |
| | GCCTTACCTGAGTTGCCAATACC |
| IFNβ S/MAR | AGTCAATATGTTCACCCCAAAAAAGCTGTTTGTTAACTTGTCAACCTCA |
| (SEQ ID NO: 31) | TTCTAAAATGTATATAGAAGCCCAAAAGACAATAACAAAAATATTCTTG |
| | TAGAACAAAATGGGAAAGAATGTTCCACTAAATATCAAGATTTAGAGC |
| | AAAGCATGAGATGTGTGGGGATAGACAGTGAGGCTGATAAAATAGAGT |
| | AGAGCTCAGAAACAGACCCATTGATATATGTAAGTGACCTATGAAAAA |
| | AATATGGCATTTTACAATGGGAAAATGATGGTCTTTTTCTTTTTTAGAA |
| | AAACAGGGAAATATATTTATATGTAAAAAATAAAAGGGAACCCATATGT |
| | CATACCATACACACAAAAAAATTCCAGTGAATTATAAGTCTAAATGGA |
| | GAAGGCAAAACTTTAAATCTTTTAGAAAATAATATAGAAGCATGCCATC |
| | AAGACTTCAGTGTAGAGAAAAATTTCTTATGACTCAAAGTCCTAACCA |
| | CAAAGAAAAGATTGTTAATTAGATTGCATGAATATTAAGACTTATTTTT |
| | AAAATTAAAAAACCATTAAGAAAAGTCAGGCCATAGAATGACAGAAA |
| | ATATTTGCAACACCCCAGTAAAGAGAATTGTAATATGCAGATTATAAAA |
| | AGAAGTCTTACAAATCAGTAAAAAATAAAACTAGACAAAAATTTGAA |
| | CAGATGAAAGAGAAACTCTAAATAATCATTACACATGAGAAACTCAAT |
| | CTCAGAAATCAGAGAACTATCATTGCATATACACTAAATTAGAGAAATA |
| | TTAAAAGGCTAAGTAACATCTGTGGC |

Super-Enhancer

| | |
|---|---|
| HR3 | AAAACAAATGACATCATTCCTGATTATAATAATTTTAATTGTGCTTTACA |
| (SEQ ID NO: 32) | AGTAGAATTCTACTTGTAAAGAGAGTTTAATTTGAAAAACAAATTAGT |
| | CATTATTAAACATGTTAACAATTGTGTATAAAAATGACATCAGTTTAATG |
| | ATGACATCATCTCTTGATTATGTTTTACAAGTAGAATTCTACTTGTAAAG |
| | CTGGTTCAGTTTTGAAAAACAAATGACATCATCTCTTGATTATGTTTTA |
| | CAAGTAGAATTCTACTTGTAAAAGTGAGTTTAGTTTTAAAAAACAAAT |
| | GACATCATTCAGTTTTGAAAAACAAATGACATCATCTCTTGATTGTGTT |
| | TTACAAGTAGAATTCTACTTGTAAAGTGAGTTCAGTTTTGAAAAACAA |
| | ATGACCCTCTCATACAATTGTTGAACAATTTTAATAAATAATCTTTACAA |
| | GATT |
| SE1 | TCCTGCAGTTAAGGAAGCCCTGGGCCTGCTGTTCTCATCCACTGAGCT |
| (SEQ ID NO: 33) | CTTCTGCCCTGGAGAAGCCCACTTGTTAGCTTATTACAGTTCATGGACA |
| | CCAGGTCCACAATGTAAGCTAACAGAAACTATGTCTGCTTTCCCATCC |
| | GTCTCAGTGACATGGAGGGGGGGGGGGGGCCACTGGCGATCCTCAAG |
| | ACCCAAACCATCCTGAGGATTTGGTTCCATTTGGCTCTCCCTAGCAGCT |
| | GCACTTGCAGGAAGAACAGCTCAGCTCACACTGCCTCTCCTCTGGCCT |
| | CACTGTGCTCAAAGGACAGGCCTCAGGCCACAGGAGGCTTTGTGCAC |
| | TGCGCCGAGTGGAGCAGTGGAGCGTCTGGGAAAAGTTGCAAACCGA |
| | GCTGGAAGACTTGCTTGGATGAGAAACTGGCGTAGGACCGAGTCTGT |
| | TTGCCCCATCAAGCTGGCCAGGCCAGATCCACCTTCCTGCCCCACAGA |
| | TGGGGAAGGCTCCTACCCATTGTTCTCCAGGATGCTTTGACAGAGAGG |
| | AAAGGGAATGTAGGCCCTGGAGACCGGAAGGTTCAGCTTCCGGGCAC |
| | CAAGCTCTGCCAGACTCACGCCTGCCCTCCAGACAGGAAGGCAGGTC |
| | CTTGGTCTCATTCTGTCCTGCCCAGCTGCTGGACCACCCCCAATCAATG |
| | CTTTCCCCTTTCTGGGCCCTTAAGGAGACGGCATACAGGAGGCTTTGT |
| | CTGTGTGCTAGCCTGGGAAGGGAATTCCAGAGGAATTGAGGAGAATA |
| | ATGCCCAAGATTTGGGGCTCCCTGGTCCCAGCTATACCATTCAGTGTAC |
| | CATTACACTCCAAGTACTGCATATGGCCACAGAAATACCTTGTATGCTC |
| | TGTGGCTGGCCTCACACATTCACATTATCAGACAAATGCCATGTGCAC |
| | AATCTTAGTTCCATATACACTC |
| SE2 | AGTGATCCTCAACTTCTGGGTCTTGATCCCTTTGGGGGCTGAACAACC |
| (SEQ ID NO: 34) | AATTAACAGGGGTAACCTACGAGCATCAGAAAACATAGATCTTTACATT |
| | ATGATTCATAGCAGTAGCAAAATGACAGCTATGAAGTAGCAACGAAAT |
| | ACTTCTATGGTTGGGGGTCACCACAACATGAAATATGGTACTAAGGGA |
| | TCGTGGCTTTAGGAAGGTTGAGAAAGCCGATCCCAGCCAGTCCTTGTC |
| | AGGCTCTGCGCTGAGCCTTTTCAGCCTGGACTTTCCAGCTTCAGGGTC |
| | CTTGGTCCTCTGGCACCACTTCCTCAACAACATTGAAAGGATGTCTGA |
| | GAGAAAGCAAGACAGCTGGGAAAGTGCTCTCAGAGGAGCTAGTCCC |
| | CCTCCGCTCTAATGGCCATTGTTCTCACCACCAGGAATGCAGTTCTTGC |
| | TCTGCTCCTTCCTGGCCTGGGACAGACTGCCCAACACCCCTCTTCCTC |
| | CTCAGGCTCCTGAGGCTGCAGCGTTAACTGCCTTAGCCTCTGGCCTCT |
| | TCGGTGGTCAAGATCATGCCCCATCCCCCCACCCTGCTCGCTCTCGAG |
| | AGTGTGCCTTCGCTCTCTCGCTCTCTCGTGTTCTCTCTCTCTCTCTCTCT |
| | CTCTCTCTCTCTCTCTCACACACACACACACACACACACACACACACA |
| | AAACCACCCCATGGGGGATCAAAACCTACACAGGACAATCTTCCTAA |
| | AACAGAACCTCTTAGTTTGAGCCCATGGTTTCAAAGCTGCTTGGGGGA |
| | CATCAGGCCACCTCTCTGACAATACCTAGTATGAAAGC |
| SE3 | ATCTGCATTTCCAACTCCTCTCTCCACCCTAATGATCCTGAGGCTTGAG |
| (SEQ ID NO: 35) | GACCATGCTCATTAAAAAAATATATTTATTTTTATTGTATGCATATTGGTA |
| | TTTTGCCTCTCTATACATCTGTGCAACCATGGGCATGCAGTGCAGGAGG |
| | GAGCCAGAAGATGGCATTAGATCCTCTGGAACCAGAGCTACAGACAC |
| | CTATTTGTGGCCAGAAAGGTACTAGTAGCAGAAACAAGGTCCTCTGGA |
| | AGAGCAACTGATGCTCTTAGGTACTGAAGCATCATCCTGCCCCAGAGA |
| | CCACTCGCATATGAAGCACACATATTCAGTCTGCCTTACTTGTGTTAAT |
| | GATTGCCAGTGTCCCTCTGACCTCCTAGCCCTGAAAAGTGTGGCCTGA |
| | AGGTCATTTCAGAGACGGGGAGAGCTGCTCAGAGAAGCCAATCGGCG |
| | AGTCTAGGACACACAGACAGGATCTAGTCCCAGAGTTCGCTAGCCTAG |
| | GTGAGCGTCCCCTGGCCCCTTATACCACTTCCTTCTCCAGCTTGCATCT |
| | AATCTGCTCTGGCAGACCATCGTGTTTCCTGTCTTCCTGGCAGCCTCCA |
| | GCACGCTCAGTGCTACTCCCTGCGCATGCGCCCTCCTCCCAGTACCTT |
| | CTCTGACTCCAGTGGGCTTGGAGTGCGAGGAGGAAGGGTGAGGAAG |
| | GGGTGAAATCAGGTATTGGATCCACAGGGGGTCTGAAGAGCACTAGC |
| | CTGGCCTTTTGGGACTGAACTTCTGCTATGAAGACCTCCACTGCCATC |
| | CCTGGAGTCCGGGGCACATCCAAGGCTTGCCTGTCCATCGTTTACTGT |
| | TTACAGATGACAACAATGACTGTGTTCGGGGCAGAAATATCCACCAGG |
| | GCTAGAGTACAAAAGGAGTTTGCATTGATGGCCGGACAGGCCCTGTCC |
| | CTGGCAGCCTGCCAGCGCTGAGTATGAGACCCAGCGGGAAGTGCTAC |
| | CCTGGCAGACGTGTCCACTGAGTACACAGACCACCAAGGCAGGCAGC |
| | TCTCGGGGAAGCTGTCTATGCTGGGCCAGCCCACCTTGAGGGCAGGG |
| | AACAGAACAGATTGTGGCAGAGAGGAAAATGTGGAGCTTCTGTTTGT |
| | TCACAGACACACGCACTCGCCCACGCACGCACGCACGCACGCACGCA |
| | CGCACGAATGCACGCACGCAGTAGTTGAATGCTATGGATTCCGCTCAG |
| | AGCTGAGAACAGCCCCAGCGACAGTTCCCTGGCCTCTCTCCTTACTCT |
| | GATGTCCTCATCTGTCTTCACATGGTCTCAGGACGCTAATACTCCATCC |
| | TAATGTACACTCCTTTCCCTGGGCCTCCGTTCCAGTTCAGTTCTCAGAG |
| | GACCTGGAGGGA |
| SE4 | TCATTATCCGCATCACCACTACCATCACCATTTCTACTTTACAGGCAGT |
| (SEQ ID NO: 36) | GGTGCTTAGGTTTGAGGAAGTCACCCACAAGAAGATTGTAGAAGTGG |
| | GACCCCGTTCTTCAGCAGCAGCCTCAGCCCCACTCCTGAGCAGGTCCT |
| | GTGACAACTCATCTCCCTGCTGGTCCTGGGGAGTGGGGAAGGGACCC |
| | CATCACTGACACTGTCTTGTTCCCAACCGGTAAGAGTCAGGGGTTCTG |
| | CCCACCATCTGGAGACCTTCGCATAGGTCCAGATTCGAGCTCTTTCTTT |
| | TAAGCACAGGGTGTTCTCTTCCACGTTATCTGTCTGCGTGGGCCACAA |
| | ACCCGGTTTATAAACAAGGCAAAAAATGGCAAGAGGAAAAAGTGAAG |
| | TCAGCCTGTGCCATTGGAGCAAGTCAAACAATACCAAGCTCGTAGCTG |
| | GCTAAGTGGCTGTCTCATTGTCCAGATATTTCCTCAGGCCATTAAACAA |
| | GCGAGGAATGATTGCCAGGTTTGATTTCAGGAAGGAAGCCCCTCCCAT |
| | TTCCCTGCCGAGCAATTCAGTGTTCATTTTCTTCTGACCCACGCTGGCT |
| | GGTTATTAGGGAAGCGCTGCATGCTTCTTTCATAAACAAAAGTTATTTG |
| | CTTCAAGATTCAAAATTCACTTCTCAACGACTGGGAAGCCCTGAGTTC |
| | CTGCCAGATGGTTTTATTATTTTGGAGGTAGGGCTAGCCCAAGTACTGG |
| | GAGCACCCTGCGACCAGAGTAGACTTTGGGGGCTGAGGGAAAGCCAT |
| | TCTGCCACTGGCCTGGAGTTCAGAGCCTTTGTCCAGAGAGCCCCTTTG |
| | GGTGGAAGACAAAGTAACTAGGTTGGTTCGGCAAAGTTCCGACGGCT |
| | GGCCCGCAGCCCTGCCTTGGGTGGCCACAGATACACACGGCCATGGG |
| | AACAGCCAGTGAACTTTTTTTTTTTTTTTTCTTAATCAGGGTCCTACTC |
| | TGCCTGTGGAGCAAGCTTGTCATTATTCTCACCTCTTGGGAGACAGTC |
| | ACTTTTTTTTTTTTTCCTTTTGAGACAAGGTTTCTCTGTGTAACAG |
| SE5 | GGGGTGGGGGCGGGGGTAGGGGAGGAGCAGGGTGCAGCTGCTCACT |
| (SEQ ID NO: 37) | GCCCTTCCCCCTCTCATGTCTCCTTGGCAGCAGCTGCCTGCTAAAGAC |
| | TAGCCCAGGCCAGGAGCTGTTTGTCTCTGCTTGTCAGAGGCGTTTCCT |
| | GATGGGTCTCTATTTTGGTTTCTGTTTTTCTCTGTGCTAACAGAGAAAG |
| | AGACGGCTCCAACGTCATGGGGTTTTCCCAGCAATTAGCCTCGGAGCA |
| | AACAGACAGCAAATCGGGATTTAATGAGTTCCTTCCCGTCCTCCTCCA |
| | TCCGCAGTGACCACTTGGTGAGCTGCCAGCCAGGGTTAGATCTGGAC |
| | CCGGTCCCCATAGCCTCCTCCAATTGTGTAGGATGAGAGACCTTGAGA |
| | ACAGGGGACCAGGCTGGCAGGCACTAGCTCATATTTAGTCATCA |

Longterm Repeat (LTR) within intron

| | |
|---|---|
| PPRV | AGGGGCCAAGTCCATACGACAGGCCCCAGCCCGCCAGACGGAGGGCC |
| (SEQ ID NO: 38) | GCAGAAAGGAAGGAGACACGACCGCCCCAGAAGGAGGA |
| MV | AGGGCCAAGGAACATACACACCCAACAGAACCCAGACCCCGGCCCAC |
| (SEQ ID NO: 39) | GGCGCCGCGCCCCCAACCCCCGACAACCAGAGGGAGCC |
| SNV | GCCGGGTACATCTCTTGCTCGGGGTCGCCGTCCTACACATTGTTGTTGT |
| (SEQ ID NO: 40) | GACGTGCGGCCCAGATTCGAATCTGTAATAAAACCTTTTTTTTTCTGAA |
| | TCCTCAGATTGGCAGTGAGAGGAGATTTTGTTCGTGGTGTTGGCTCGC |
| | CTACTGGGTGGGCGCAGGGATCCGGACTGAATCCGTAGTACTTCGGTA |
| | CAACATTTGGGGG |
| RU5 | GGTCGCCGTCCTACACATTGTTGTTGTGACGTGCGGCCCAGATTCGAA |
| (SEQ ID NO: 41) | TCTGTATAAAACTTTTTTTTTTCTGAATCCTCAGATTGGCAGTGAGAGG |
| | AGATTTTGTTCGTGGTGTTGGCTCGCCTACTGGGTGGGCGCAGGGATC |
| | CGGACTGAATCCGTAGTACT |

Microtubule-associated Sequence (NLS-MTAS)

| | |
|---|---|
| NLS-MTAS | GRYLTQETNKVETYKEQPLKTPGKKKKGKPGKRKEQEKKKRRTR |
| (SEQ ID NO: 42) | |
| NLS-MTAScoding | GGCAGATACCTGACACAAGAGACAAACAAGGTGGAAACCTACAAAG |
| sequence | AGCAGCCCCTGAAAACCCCAGGCAAGAAGAAGAAGGGCAAGCCTGG |
| (SEQ ID NO: 43) | AAAGAGGAAAGAACAAGAGAAAAAGAAGAGAAGGACCAGA |
| NLS-MTAS- | GRYLTQETNKVETYKEQPLKTPGKKKKGKPGKRKEQEKKKRRTRDRDD |
| Hydrophillic Linker- | QAAWFSQY |
| Modified Neck | |
| Domain Peptide | |
| (SEQ ID NO: 44) | |
| NLS-MTAS- | GGCAGATACCTGACACAAGAGACAAACAAGGTGGAAACCTACAAAG |
| Hydrophillic Linker- | AGCAGCCCCTGAAAACCCCAGGCAAGAAGAAGAAGGGCAAGCCTGG |
| Modified Neck | AAAGAGGAAAGAACAAGAGAAAAAGAAGAGAAGGACCAGAGACAG |
| Domain Peptide | GGATGACCAGGCTGCTTGGTTTTCTCAGTAC |
| coding sequence | |
| (SEQ ID NO: 45) | |

[0282] In certain embodiments, one or more (e.g., at least 3, or at least 8 antibodies) are expressed with the systems and methods herein. In some embodiments, this includes the therapeutic monoclonal antibodies (mAbs), Fabs, F(ab)2s, and scFv's that are shown in Table 4 below, as well as the anti-SARS-CoV2 antibodies 5 and antigen bindings provided at Table 5 and Table 7, which is herein incorporated by reference.

TABLE 4

| A | B | | | | |
|---|---|---|---|---|---|
| Antibody | Trade | C | D | E | F |
| Name | name | Type | Source | Target | Use |
| 3F8 | | mab | mouse | GD2 | neuroblastoma |
| | | | | ganglioside | |
| 8H9 | | mab | mouse | B7-H3 | neuroblastoma, |
| | | | | | sarcoma, metastatic |
| | | | | | brain cancers |
| Abagovomab | | mab | mouse | CA-125 | ovarian cancer |
| | | | | (imitation) | |
| Abciximab | ReoPro | Fab | chimeric | CD41 (integrin | platelet aggregation |
| | | | | alpha-IIb) | inhibitor |
| Abituzumab | | mab | humanized | CD51 | cancer |
| Abrilumab | | mab | human | integrin α4β7 | inflammatory |
| | | | | | bowel disease, |
| | | | | | ulcerative colitis, |
| | | | | | Crohn's disease |
| Actoxumab | | mab | human | Clostridium | Clostridium |
| | | | | difficile | difficile colitis |
| Adalimumab | Humira | mab | human | TNF-α | Rheumatoid |
| | | | | | arthritis, Crohn's |
| | | | | | Disease, Plaque |
| | | | | | Psoriasis, Psoriatic |
| | | | | | Arthritis, |
| | | | | | Ankylosing |
| | | | | | Spondylitis, |
| | | | | | Juvenile Idiopathic |
| | | | | | Arthritis, |
| | | | | | Hemolytic disease |
| | | | | | of the newborn |
| Adecatumumab | | mab | human | EpCAM | prostate and breast |
| | | | | | cancer |
| Aducanumab | | mab | human | beta-amyloid | Alzheimer's disease |
| Afasevikumab | | mab | human | IL17A and | — |
| | | | | IL17F | |
| Afelimomab | | F(ab')₂ | mouse | TNF-α | sepsis |
| Afutuzumab | | mab | humanized | CD20 | lymphoma |
| Alacizumab pegol | | F(ab')₂ | humanized | VEGFR2 | cancer |
| ALD518 | | — | humanized | IL-6 | rheumatoid arthritis |
| Alemtuzumab | Lemtrada, | mab | humanized | CD52 | Multiple sclerosis |
| | Campath | | | | |
| Alirocumab | | mab | human | PCSK9 | hypercholesterolemia |
| Altumomab | Hybri- | mab | mouse | CEA | colorectal cancer |
| pentetate | ceaker | | | | (diagnosis) |
| Amatuximab | | mab | chimeric | mesothelin | cancer |
| Anatumomab | | Fab | mouse | TAG-72 | non-small cell lung |
| mafenatox | | | | | carcinoma |
| Anetumab | | mab | human | MSLN | cancer |
| ravtansine | | | | | |
| Anifrolumab | | mab | human | interferon α/β | systemic lupus |
| | | | | receptor | erythematosus |
| Anrukinzumab (= | | mab | humanized | IL-13 | asthma |
| IMA-638) | | | | | |
| Apolizumab | | mab | humanized | HLA-DR— | hematological |
| | | | | | cancers |
| Arcitumomab | CEA-Scan | Fab' | mouse | CEA | gastrointestinal |
| | | | | | cancers (diagnosis) |
| Ascrinvacumab | | mab | human | activin | cancer |
| | | | | receptor-like | |
| | | | | kinase 1 | |
| Aselizumab | | mab | humanized | L-selectin | severely injured |
| | | | | (CD62L) | patients |
| Atezolizumab | | mab | humanized | CD274 | cancer |
| Atinumab | | mab | human | RTN4 | — |
| Atlizumab (= | Actemra, | mab | humanized | IL-6 receptor | rheumatoid arthritis |
| tocilizumab) | RoActemra | | | | |
| Atorolimumab | | mab | human | Rhesus factor | hemolytic disease |
| | | | | | of the |
| | | | | | newborn[citation |
| | | | | | needed] |
| Avelumab | | mab | human | CD274 | — |
| Bapineuzumab | | mab | humanized | beta amyloid | Alzheimer's disease |
| Basiliximab | Simulect | mab | chimeric | CD25 (α chain | prevention of organ |
| | | | | of IL-2 | transplant |
| | | | | receptor) | rejections |
| Bavituximab | | mab | chimeric | phosphatidylser | cancer, viral |
| | | | | ine | infections |
| Bectumomab | LymphoScan | Fab' | mouse | CD22 | non-Hodgkin's |
| | | | | | lymphoma |
| | | | | | (detection) |
| Begelomab | | mab | mouse | DPP4 | — |
| Belimumab | Benlysta, | mab | human | BAFF | non-Hodgkin |
| | LymphoSta | | | | lymphoma etc. |
| | t-B | | | | |
| Benralizumab | | mab | humanized | CD 125 | asthma |
| Bertilimumab | | mab | human | CCL11 | severe allergic |
| | | | | (eotaxin-1) | disorders |
| Besilesomab | Scintimun | mab | mouse | CEA-related | inflammatory |
| | | | | antigen | lesions and |
| | | | | | metastases |
| | | | | | (detection) |
| Bevacizumab | Avastin | mab | humanized | VEGF-A | metastatic cancer, |
| | | | | | retinopathy of |
| | | | | | prematurity |
| Bezlotoxumab | | mab | human | Clostridium | Clostridium |
| | | | | difficile | difficile colitis |
| Biciromab | FibriScint | Fab' | mouse | fibrin II, beta | thromboembolism |
| | | | | chain | (diagnosis) |
| Bimagrumab | | mab | human | ACVR2B | myostatin inhibitor |
| Bimekizumab | | mab | humanized | IL 17A and IL | — |
| | | | | 17F | |
| Bivatuzumab | | mab | humanized | CD44 v6 | squamous cell |
| mertansine | | | | | carcinoma |
| Bleselumab | | mab | human | CD40 | — |
| Blinatumomab | | BiTE | mouse | CD19 | pre-B ALL |
| | | | | | (CD 19+) |
| Blontuvetmab | Biontress | mab | veterinary | CD20 | — |
| Blosozumab | | mab | humanized | SOST | osteoporosis |
| Bococizumab | | mab | humanized | neural | dyslipidemia |
| | | | | apoptosis- | |
| | | | | regulated | |
| | | | | proteinase 1 | |
| Brazikumab | | mab | human | IL23 | Crohn's disease |
| Brentuximab | | mab | chimeric | CD30 | hematologic |
| vedotin | | | | (TNFRSF8) | cancers |
| Briakinumab | | mab | human | IL-12, IL-23 | psoriasis, |
| | | | | | rheumatoid |
| | | | | | arthritis, |
| | | | | | inflammatory |
| | | | | | bowel diseases, |
| | | | | | multiple sclerosis |
| Brodalumab | | mab | human | IL-17 | inflammatory |
| | | | | | diseases |
| Brolucizumab | | mab | humanized | VEGFA | wet age-related |
| | | | | | macular |
| | | | | | degeneration |
| Brontictuzumab | | mab | humanized | Notch 1 | cancer |
| Burosumab | | mab | human | FGF23 | X-linked |
| | | | | | hypophosphatemia |
| Cabiralizumab | | mab | humanized | CSF1R | — |
| Canakinumab | Ilaris | mab | human | IL-1— | rheumatoid arthritis |
| Cantuzumab | | mab | humanized | mucin CanAg | colorectal cancer |
| mertansine | | | | | etc. |
| Cantuzumab | | mab | humanized | MUC1 | cancers |
| ravtansine | | | | | |
| Caplacizumab | | mab | humanized | VWF | thrombotic |
| | | | | | thrombocytopenic |
| | | | | | purpura, |
| | | | | | thrombosis |
| Capromab | Prostascint | mab | mouse | prostatic | prostate cancer |
| pendetide | | | | carcinoma cells | (detection) |
| Carlumab | | mab | human | MCP-1 | oncology/immune |
| | | | | | indications |
| Carotuximab | | mab | chimeric | endoglin | — |
| Catumaxomab | Removab | 3funct | rat/mouse | EpCAM, CD3 | ovarian cancer, |
| | | | hybrid | | malignant ascites, |
| | | | | | gastric cancer |
| cBR96- | | mab | humanized | Lewis-Y | cancer |
| doxorubicin | | | | antigen | |
| immunoconjugate | | | | | |
| Cedelizumab | | mab | humanized | CD4 | prevention of organ |
| | | | | | transplant |
| | | | | | rejections, |
| | | | | | treatment of |
| | | | | | autoimmune |
| | | | | | diseases |
| Cergutuzumab | | mab | humanized | IL2 | — |
| amunaleukin | | | | | |
| Certolizumab | Cimzia | Fab' | humanized | TNF-α | Crohn's disease |
| pegol | | | | | Rheumatoid |
| | | | | | arthritis axial |
| | | | | | spondyloarthritis |
| | | | | | psoriasis arthritis |
| Cetuximab | Erbitux | mab | chimeric | EGFR | metastatic |
| | | | | | colorectal cancer |
| | | | | | and head and neck |
| | | | | | cancer |
| Ch.14.18 | | mab | chimeric | GD2 | neuroblastoma |
| | | | | ganglioside | |
| Citatuzumab | | Fab | humanized | EpCAM | ovarian cancer and |
| bogatox | | | | | other solid tumors |
| Cixutumumab | | mab | human | IGF-1 receptor | solid tumors |
| | | | | (CD221) | |
| Clazakizumab | | mab | humanized | Oryctolagus | rheumatoid arthritis |
| | | | | cuniculus | |
| Clenoliximab | | mab | chimeric | CD4 | rheumatoid arthritis |
| Clivatuzumab | hPAM4- | mab | humanized | MUC1 | pancreatic cancer |
| tetraxetan | Cide | | | | |
| Codrituzumab | | mab | humanized | glypican 3 | cancer |
| Coltuximab | | mab | chimeric | CD19 | cancer |
| ravtansine | | | | | |
| Conatumumab | | mab | human | TRAIL-R2 | cancer |
| Concizumab | | mab | humanized | TFPI | bleeding |
| CR6261 | | mab | human | Influenza A | infectious |
| | | | | hemagglutinin | disease/influenza A |
| Crenezumab | | mab | humanized | 1-40-β-amyloid | Alzheimer's disease |
| Crotedumab | | mab | human | GCGR | diabetes |
| Dacetuzumab | | mab | humanized | CD40 | hematologic |
| | | | | | cancers |
| Daclizumab | Zenapax | mab | humanized | CD25 (α chain | prevention of organ |
| | | | | of IL-2 | transplant |
| | | | | receptor) | rejections |
| Dalotuzumab | | mab | humanized | IGF-1 receptor | cancer etc. |
| | | | | (CD221) | |
| Dapirolizumab | | mab | humanized | CD 154 | — |
| pegol | | | | (CD40L) | |
| Daratumumab | | mab | human | CD38 (cyclic | cancer |
| | | | | ADP ribose | |
| | | | | hydrolase) | |
| Dectrekumab | | mab | human | IL-13 | — |
| Demcizumab | | mab | humanized | DLL4 | cancer |
| Denintuzumab | | mab | humanized | CD19 | cancer |
| mafodotin | | | | | |
| Denosumab | Prolia | mab | human | RANKL | osteoporosis, bone |
| | | | | | metastases etc. |
| Depatuxizumab | | mab | chimeric/ | EGFR | cancer |
| mafodotin | | | humanized | | |
| Derlotuximab | | mab | chimeric | histone | recurrent |
| biotin | | | | complex | glioblastoma |
| | | | | | multiforme |
| Detumomab | | mab | mouse | B-lymphoma | lymphoma |
| | | | | cell | |
| Dinutuximab | | mab | chimeric | GD2 | neuroblastoma |
| | | | | ganglioside | |
| Diridavumab | | mab | human | hemagglutinin | influenza A |
| Domagrozumab | | mab | humanized | GDF-8 | Duchenne muscular |
| | | | | | dystrophy |
| Dorlimomab | | F(ab′)₂ | mouse | — | — |
| aritox | | | | | |
| Drozitumab | | mab | human | DR5 | cancer etc. |
| Duligotumab | | mab | human | ERBB3 | testicular cancer |
| | | | | (HER3) | |
| Dupilumab | | mab | human | IL4 | atopic diseases |
| Durvalumab | | mab | human | CD274 | cancer |
| Dusigitumab | | mab | human | ILGF2 | cancer |
| Ecromeximab | | mab | chimeric | GD3 | malignant |
| | | | | ganglioside | melanoma |
| Eculizumab | Soliris | mab | humanized | C5 | paroxysmal |
| | | | | | nocturnal |
| | | | | | hemoglobinuria, |
| | | | | | atypical HUS |
| Edobacomab | | mab | mouse | endotoxin | sepsis caused by |
| | | | | | Gram-negative |
| | | | | | bacteria |
| Edrecolomab | Panorex | mab | mouse | EpCAM | colorectal |
| | | | | | carcinoma |
| Efalizumab | Raptiva | mab | humanized | LFA-1 | psoriasis (blocks T- |
| | | | | (CD11a) | cell migration) |
| Efungumab | Mycograb | scFv | human | Hsp90 | invasive Candida |
| | | | | | infection |
| Eldelumab | | mab | human | interferon | Crohn's disease, |
| | | | | gamma- | ulcerative colitis |
| | | | | induced protein | |
| Elgemtumab | | mab | human | ERBB3 | cancer |
| | | | | (HER3) | |
| Elotuzumab | | mab | humanized | SLAMF7 | multiple myeloma |
| Elsilimomab | | mab | mouse | IL-6 | — |
| Emactuzumab | | mab | humanized | CSF1R | cancer |
| Emibetuzumab | | mab | humanized | HHGFR | cancer |
| Emicizumab | | mab | humanized | activated F9, | haemophilia A |
| | | | | F10 | |
| Enavatuzumab | | mab | humanized | TWEAK | cancer etc. |
| | | | | receptor | |
| Enfortumab | | mab | human | AGS-22M6 | cancer expressing |
| vedotin | | | | | Nectin-4 |
| Enlimomab pegol | | mab | mouse | ICAM-1 | — |
| | | | | (CD54) | |
| Enoblituzumab | | mab | humanized | CD276 | cancer |
| Enokizumab | | mab | humanized | IL9 | asthma |
| Enoticumab | | mab | human | DLL4 | — |
| Ensituximab | | mab | chimeric | 5AC | cancer |
| Epitumomab | | mab | mouse | episialin | — |
| cituxetan | | | | | |
| Epratuzumab | | mab | humanized | CD22 | cancer, SLE |
| Erenumab | | mab | human | CGRP | migraine |
| Erlizumab | | F(ab′)₂ | humanized | ITGB2 (CD18) | heart attack, stroke, |
| | | | | | traumatic shock |
| Ertumaxomab | Rexomun | 3funct | rat/mouse | HER2/neu, | breast cancer etc. |
| | | | hybrid | CD3 | |
| Etaracizumab | Abegrin | mab | humanized | integrin αvβ3 | melanoma, prostate |
| | | | | | cancer, ovarian |
| | | | | | cancer etc. |
| Etrolizumab | | mab | humanized | integrin α7 β7 | inflammatory |
| | | | | | bowel disease |
| Evinacumab | | mab | human | angiopoietin 3 | dyslipidemia |
| Evolocumab | | mab | human | PCSK9 | hyper- |
| | | | | | cholesterolemia |
| Exbivirumab | | mab | human | hepatitis B | hepatitis B |
| | | | | surface antigen | |
| Fanolesomab | NeutroSpec | mab | mouse | CD15 | appendicitis |
| | | | | | (diagnosis) |
| Faralimomab | | mab | mouse | interferon | — |
| | | | | receptor | |
| Farletuzumab | | mab | humanized | folate receptor | ovarian cancer |
| | | | | 1 | |
| Fasinumab | | mab | human | HNGF | acute sciatic pain |
| FBTA05 | Lymphomun | 3funct | rat/mouse | CD20 | chronic |
| | | | hybrid | | lymphocytic |
| | | | | | leukaemia |
| Felvizumab | | mab | humanized | respiratory | respiratory |
| | | | | syncytial virus | syncytial virus |
| | | | | | infection |
| Fezakinumab | | mab | human | IL-22 | rheumatoid |
| | | | | | arthritis, psoriasis |
| Fibatuzumab | | mab | humanized | ephrin receptor | — |
| | | | | A3 | |
| Ficlatuzumab | | mab | humanized | HGF | cancer etc. |
| Figitumumab | | mab | human | IGF-1 receptor | adrenocortical |
| | | | | (CD221) | carcinoma, non- |
| | | | | | small cell lung |
| | | | | | carcinoma etc. |
| Firivumab | | mab | human | influenza A | — |
| | | | | virus | |
| | | | | hemagglutinin | |
| Flanvotumab | | mab | human | TYRP1(glycop | melanoma |
| | | | | rotein 75) | |
| Fletikumab | | mab | human | IL 20 | rheumatoid arthritis |
| Fontolizumab | HuZAF | mab | humanized | IFN-γ | Crohn's disease etc. |
| Foralumab | | mab | human | CD3 epsilon | — |
| Foravirumab | | mab | human | rabies virus | rabies |
| | | | | glycoprotein | (prophylaxis) |
| Fresolimumab | | mab | human | TGF-β | idiopathic |
| | | | | | pulmonary fibrosis, |
| | | | | | focal segmental |
| | | | | | glomerulosclerosis, |
| | | | | | cancer |
| Fulranumab | | mab | human | NGF | pain |
| Futuximab | | mab | chimeric | EGFR | cancer |
| Galcanezumab | | mab | humanized | calcitonin | migraine |
| Galiximab | | mab | chimeric | CD80 | B-cell lymphoma |
| Ganitumab | | mab | human | IGF-1 receptor | cancer |
| | | | | (CD221) | |
| Gantenerumab | | mab | human | beta amyloid | Alzheimer's disease |
| Gavilimomab | | mab | mouse | CD147 | graft versus host |
| | | | | (basigin) | disease |
| Gemtuzumab | Mylotarg | mab | humanized | CD33 | acute myelogenous |
| ozogamicin | | | | | leukemia |
| Gevokizumab | | mab | humanized | IL-1β | diabetes etc. |
| Girentuximab | Rencarex | mab | chimeric | carbonic | clear cell renal cell |
| | | | | anhydrase 9 | carcinoma[84] |
| | | | | (CA-IX) | |
| Glembatumumab | | mab | human | GPNMB | melanoma, breast |
| vedotin | | | | | cancer |
| Golimumab | Simponi | mab | human | TNF-α | rheumatoid |
| | | | | | arthritis, psoriatic |
| | | | | | arthritis, ankylosing |
| | | | | | spondylitis |
| Gomiliximab | | mab | chimeric | CD23 (IgE | allergic asthma |
| | | | | receptor) | |
| Guselkumab | | mab | human | IL23 | psoriasis |
| Ibalizumab | | mab | humanized | CD4 | HIV infection |
| Ibritumomab | Zevalin | mab | mouse | CD20 | non-Hodgkin's |
| tiuxetan | | | | | lymphoma |
| Icrucumab | | mab | human | VEGFR-1 | cancer etc. |
| Idarucizumab | | mab | humanized | dabigatran | reversal of |
| | | | | | anticoagulant |
| | | | | | effects of |
| | | | | | dabigatran |
| Igovomab | Indimacis- | F(ab′)₂ | mouse | CA-125 | ovarian cancer |
| | 125 | | | | (diagnosis) |
| IMAB362 | | mab | human | CLDN18.2 | gastrointestinal |
| | | | | | adenocarcinomas |
| | | | | | and pancreatic |
| | | | | | tumor |
| Imalumab | | mab | human | MIF | cancer |
| Imciromab | Myoscint | mab | mouse | cardiac myosin | cardiac imaging |
| Imgatuzumab | | mab | humanized | EGFR | cancer |
| Inclacumab | | mab | human | selectin P | cardiovascular |
| | | | | | disease |
| Indatuximab | | mab | chimeric | SDC1 | cancer |
| ravtansine | | | | | |
| Indusatumab | | mab | human | GUCY2C | cancer |
| vedotin | | | | | |
| Inebilizumab | | mab | humanized | CD19 | cancer, systemic |
| | | | | | sclerosis, multiple |
| | | | | | sclerosis |
| Infliximab | Remicade | mab | chimeric | TNF-α | rheumatoid |
| | | | | | arthritis, ankylosing |
| | | | | | spondylitis, |
| | | | | | psoriatic arthritis, |
| | | | | | psoriasis, Crohn's |
| | | | | | disease, ulcerative |
| | | | | | colitis |
| Inolimomab | | mab | mouse | CD25 (α chain | graft versus host |
| | | | | of IL-2 | disease |
| | | | | receptor) | |
| Inotuzumab | | mab | humanized | CD22 | ALL |
| ozogamicin | | | | | |
| Intetumumab | | mab | human | CD51 | solid tumors |
| | | | | | (prostate cancer, |
| | | | | | melanoma) |
| Ipilimumab | Yervoy | mab | human | CD152 | melanoma |
| Iratumumab | | mab | human | CD30 | Hodgkin's |
| | | | | (TNFRSF8) | lymphoma |
| Isatuximab | | mab | chimeric | CD38 | cancer |
| Itolizumab | | mab | humanized | CD6 | — |
| Ixekizumab | | mab | humanized | IL 17A | autoimmune |
| | | | | | diseases |
| Keliximab | | mab | chimeric | CD4 | chronic asthma |
| Labetuzumab | CEA-Cide | mab | humanized | CEA | colorectal cancer |
| Lampalizumab | | mab | humanized | CFD | geographic atrophy |
| | | | | | secondary to age- |
| | | | | | related macular |
| | | | | | degeneration |
| Lanadelumab | | mab | human | kallikrein | angioedema |
| Landogrozumab | | mab | humanized | GDF-8 | muscle wasting |
| | | | | | disorders |
| Laprituximab | | mab | chimeric | EGFR | — |
| emtansine | | | | | |
| Lebrikizumab | | mab | humanized | IL-13 | asthma |
| Lemalesomab | | mab | mouse | NCA-90 | diagnostic agent |
| | | | | (granulocyte | |
| | | | | antigen) | |
| Lendalizumab | | mab | humanized | C5 | — |
| Lenzilumab | | mab | human | CSF2 | — |
| Lerdelimumab | | mab | human | TGF beta 2 | reduction of |
| | | | | | scarring after |
| | | | | | glaucoma surgery |
| Lexatumumab | | mab | human | TRAIL-R2 | cancer |
| Libivirumab | | mab | human | hepatitis B | hepatitis B |
| | | | | surface antigen | |
| Lifastuzumab | | mab | humanized | phosphate- | cancer |
| vedotin | | | | sodium co- | |
| | | | | transporter | |
| Ligelizumab | | mab | humanized | IGHE | severe asthma and |
| | | | | | chronic |
| | | | | | spontaneous |
| | | | | | urticaria |
| Lilotomab | | mab | mouse | CD37 | cancer |
| satetraxetan | | | | | |
| Lintuzumab | | mab | humanized | CD33 | cancer |
| Lirilumab | | mab | human | KIR2D | solid and |
| | | | | | hematological |
| | | | | | cancers |
| Lodelcizumab | | mab | humanized | PCSK9 | hyper- |
| | | | | | cholesterolemia |
| Lokivetmab | | mab | veterinary | Canis lupus | — |
| | | | | familiaris IL31 | |
| Lorvotuzumab | | mab | humanized | CD56 | cancer |
| mertansine | | | | | |
| Lucatumumab | | mab | human | CD40 | multiple myeloma, |
| | | | | | non-Hodgkin's |
| | | | | | lymphoma, |
| | | | | | Hodgkin's |
| | | | | | lymphoma |
| Lulizumab pegol | | mab | humanized | CD28 | autoimmune |
| | | | | | diseases |
| Lumiliximab | | mab | chimeric | CD23 (IgE | chronic |
| | | | | receptor) | lymphocytic |
| | | | | | leukemia |
| Lumretuzumab | | mab | humanized | ERBB3 | cancer |
| | | | | (HER3) | |
| MABp1 | Xilonix | mab | human | IL1A | colorectal cancer |
| Mapatumumab | | mab | human | TRAIL-R1 | cancer |
| Margetuximab | | mab | humanized | ch4D5 | cancer |
| Maslimomab | | | mouse | T-cell receptor | — |
| Matuzumab | | mab | humanized | EGFR | colorectal, lung and |
| | | | | | stomach cancer |
| Mavrilimumab | | mab | human | GMCSF | rheumatoid arthritis |
| | | | | receptor α- | |
| | | | | chain | |
| Mepolizumab | Bosatria | mab | humanized | IL-5 | asthma and white |
| | | | | | blood cell diseases |
| Metelimumab | | mab | human | TGF beta 1 | systemic |
| | | | | | scleroderma |
| Milatuzumab | | mab | humanized | CD74 | multiple myeloma |
| | | | | | and other |
| | | | | | hematological |
| | | | | | malignancies |
| Minretumomab | | mab | mouse | TAG-72 | tumor detection |
| | | | | | (and therapy ) |
| Mirvetuximab | | mab | chimeric | folate receptor | cancer |
| soravtansine | | | | alpha | |
| Mitumomab | | mab | mouse | GD3 | small cell lung |
| | | | | ganglioside | carcinoma |
| Mogamulizumab | | mab | humanized | CCR4 | cancer |
| Monalizumab | | mab | humanized | KLRC1 | — |
| Morolimumab | | mab | human | Rhesus factor | — |
| Motavizumab | Numax | mab | humanized | respiratory | respiratory |
| | | | | syncytial virus | syncytial virus |
| | | | | | (prevention) |
| Moxetumomab | | mab | mouse | CD22 | cancer |
| pasudotox | | | | | |
| Muromonab-CD3 | Orthoclone | mab | mouse | CD3 | prevention of organ |
| | OKT3 | | | | transplant |
| | | | | | rejections |
| Nacolomab | | Fab | mouse | C242 antigen | colorectal cancer |
| tafenatox | | | | | |
| Namilumab | | mab | human | CSF2 | — |
| Naptumomab | | Fab | mouse | 5T4 | non-small cell lung |
| estafenatox | | | | | carcinoma, renal |
| | | | | | cell carcinoma |
| Naratuximab | | mab | chimeric | CD37 | — |
| emtansine | | | | | |
| Narnatumab | | mab | human | RON | cancer |
| Natalizumab | Tysabri | mab | humanized | integrin α4 | multiple sclerosis, |
| | | | | | Crohn's disease |
| Navicixizumab | | mab | chimeric/ | DLL4 | — |
| | | | humanized | | |
| Navivumab | | mab | human | influenza A | — |
| | | | | virus | |
| | | | | hemagglutinin | |
| | | | | HA | |
| Nebacumab | | mab | human | endotoxin | sepsis |
| Necitumumab | | mab | human | EGFR | non-small cell lung |
| | | | | | carcinoma |
| Nemolizumab | | mab | humanized | IL31RA | eczema[106] |
| Nerelimomab | | mab | mouse | TNF-α | — |
| Nesvacumab | | mab | human | angiopoietin 2 | cancer |
| Nimotuzumab | Theracim, | mab | humanized | EGFR | squamous cell |
| | Theraloc | | | | carcinoma, head |
| | | | | | and neck cancer, |
| | | | | | nasopharyngeal |
| | | | | | cancer, glioma |
| Nivolumab | Opdivo | mab | human | PD-1 | cancer |
| Nofetumomab | Verluma | Fab | mouse | | cancer (diagnosis) |
| merpentan | | | | | |
| Obiltoxaximab | | mab | chimeric | Bacillus | Bacillus anthracis |
| | | | | anthracis | spores |
| | | | | anthrax | |
| Obinutuzumab | Gazyva | mab | humanized | CD20 | Chronic lymphatic |
| | | | | | leukemia |
| Ocaratuzumab | | mab | humanized | CD20 | cancer |
| Ocrelizumab | | mab | humanized | CD20 | rheumatoid |
| | | | | | arthritis, lupus |
| | | | | | erythematosus etc. |
| Odulimomab | | mab | mouse | LFA-1 | prevention of organ |
| | | | | (CD11a) | transplant |
| | | | | | rejections, |
| | | | | | immunological |
| | | | | | diseases |
| Ofatumumab | Arzerra | mab | human | CD20 | chronic |
| | | | | | lymphocytic |
| | | | | | leukemia etc. |
| Olaratumab | | mab | human | PDGF-R α | cancer |
| Olokizumab | | mab | humanized | IL6 | — |
| Omalizumab | Xolair | mab | humanized | IgE Fc region | allergic asthma |
| Onartuzumab | | mab | humanized | human scatter | cancer |
| | | | | factor receptor | |
| | | | | kinase | |
| Ontuxizumab | | mab | chimeric/ | TEM1 | cancer |
| | | | humanized | | |
| Opicinumab | | mab | human | LINGO-1 | multiple sclerosis |
| Oportuzumab | | scFv | humanized | EpCAM | cancer |
| monatox | | | | | |
| Oregovomab | OvaRex | mab | mouse | CA-125 | ovarian cancer |
| Orticumab | | mab | human | oxLDL | — |
| Otelixizumab | | mab | chimeric/ | CD3 | diabetes mellitus |
| | | | humanized | | type 1 |
| Otlertuzumab | | mab | humanized | CD37 | cancer |
| Oxelumab | | mab | human | OX-40 | asthma |
| Ozanezumab | | mab | humanized | NOGO-A | ALS and multiple |
| | | | | | sclerosis |
| Ozoralizumab | | mab | humanized | TNF-α | inflammation |
| Pagibaximab | | mab | chimeric | lipoteichoic | sepsis |
| | | | | acid | (Staphylococcus) |
| Palivizumab | Synagis, | mab | humanized | F protein of | respiratory |
| | Abbosynagis | | | respiratory | syncytial virus |
| | | | | syncytial virus | (prevention) |
| Pamrevlumab | | mab | human | CTGF | — |
| Panitumumab | Vectibix | mab | human | EGFR | colorectal cancer |
| Pankomab | | mab | humanized | tumor specific | ovarian cancer |
| | | | | glycosylation | |
| | | | | ofMUC1 | |
| Panobacumab | | mab | human | Pseudomonas | Pseudomonas |
| | | | | aeruginosa | aeruginosa |
| | | | | | infection |
| Parsatuzumab | | mab | human | EGFL7 | cancer |
| Pascolizumab | | mab | humanized | IL-4 | asthma |
| Pasotuxizumab | | mab | chimeric/ | folate | cancer |
| | | | humanized | hydrolase | |
| Pateclizumab | | mab | humanized | LTA | TNF |
| Patritumab | | mab | human | ERBB3 | cancer |
| | | | | (HER3) | |
| Pembrolizumab | | mab | humanized | PDCD1 | melanoma and |
| | | | | | other cancers |
| Pemtumomab | Theragyn | | mouse | MUC1 | cancer |
| Perakizumab | | mab | humanized | IL 17A | arthritis |
| Pertuzumab | Omnitarg | mab | humanized | HER2/neu | cancer |
| Pexelizumab | | scFv | humanized | C5 | reduction of side |
| | | | | | effects of cardiac |
| | | | | | surgery |
| Pidilizumab | | mab | humanized | PD-1 | cancer and |
| | | | | | infectious diseases |
| Pinatuzumab | | mab | humanized | CD22 | cancer |
| vedotin | | | | | |
| Pintumomab | | mab | mouse | adenocarcinom | adenocarcinoma |
| | | | | a antigen | (imaging) |
| Placulumab | | mab | human | human TNF | pain and |
| | | | | | inflammatory |
| | | | | | diseases |
| Plozalizumab | | mab | humanized | CCR2 | diabetic |
| | | | | | nephropathy and |
| | | | | | arteriovenous graft |
| | | | | | patency |
| Pogalizumab | | mab | humanized | TNFR | — |
| | | | | superfamily | |
| | | | | member 4 | |
| Polatuzumab | | mab | humanized | CD79B | cancer |
| vedotin | | | | | |
| Ponezumab | | mab | humanized | human beta- | Alzheimer's disease |
| | | | | amyloid | |
| Prezalizumab | | mab | humanized | ICOSL | — |
| Priliximab | | mab | chimeric | CD4 | Crohn's disease, |
| | | | | | multiple sclerosis |
| Pritoxaximab | | mab | chimeric | E. coli shiga | — |
| | | | | toxin type-1 | |
| Pritumumab | | mab | human | vimentin | brain cancer |
| PRO 140 | | | humanized | CCR5 | HIV infection |
| Quilizumab | | mab | humanized | IGHE | asthma |
| Racotumomab | | mab | mouse | N- | cancer |
| | | | | glycolylneuraminic | |
| | | | | acid | |
| Radretumab | | mab | human | fibronectin | cancer |
| | | | | extra domain-B | |
| Rafivirumab | | mab | human | rabies virus | rabies |
| | | | | glycoprotein | (prophylaxis) |
| Ralpancizumab | | mab | humanized | neural | dyslipidemia |
| | | | | apoptosis- | |
| | | | | regulated | |
| | | | | proteinase 1 | |
| Ramucirumab | Cyramza | mab | human | VEGFR2 | solid tumors |
| Ranibizumab | Lucentis | Fab | humanized | VEGF-A | macular |
| | | | | | degeneration (wet |
| | | | | | form) |
| Raxibacumab | | mab | human | anthrax toxin, | anthrax |
| | | | | protective | (prophylaxis and |
| | | | | antigen | treatment) |
| Refanezumab | | mab | humanized | myelin- | recovery of motor |
| | | | | associated | function after |
| | | | | glycoprotein | stroke |
| Regavirumab | | mab | human | cytomegalovirus | cytomegalovirus |
| | | | | glycoprotein | infection |
| | | | | B | |
| Reslizumab | | mab | humanized | IL-5 | inflammations of |
| | | | | | the airways, skin |
| | | | | | and gastrointestinal |
| | | | | | tract |
| Rilotumumab | | mab | human | HGF | solid tumors |
| Rinucumab | | mab | human | platelet-derived | neovascular age- |
| | | | | growth factor | related macular |
| | | | | receptor beta | degeneration |
| Risankizumab | | mab | humanized | IL23A | — |
| Rituximab | MabThera, | mab | chimeric | CD20 | lymphomas, |
| | Rituxan | | | | leukemias, some |
| | | | | | autoimmune |
| | | | | | disorders |
| Rivabazumab | | mab | humanized | Pseudomonas | — |
| pegol | | | | aeruginosa type | |
| | | | | III secretion | |
| | | | | system | |
| Robatumumab | | mab | human | IGF-1 receptor | cancer |
| | | | | (CD221) | |
| Roledumab | | mab | human | RHD | — |
| Romosozumab | | mab | humanized | sclerostin | osteoporosis |
| Rontalizumab | | mab | humanized | IFN-α | systemic lupus |
| | | | | | erythematosus |
| Rovalpituzumab | | mab | humanized | DLL3 | — |
| tesirine | | | | | |
| Rovelizumab | LenkArrest | mab | humanized | CD11, CD18 | haemorrhagic |
| | | | | | shock etc. |
| Ruplizumab | Antova | mab | humanized | CD154 | rheumatic diseases |
| | | | | (CD40L) | |
| Sacituzumab | | mab | humanized | tumor- | cancer |
| govitecan | | | | associated | |
| | | | | calcium signal | |
| | | | | transducer 2 | |
| Samalizumab | | mab | humanized | CD200 | cancer |
| Sapelizumab | | mab | humanized | IL6R | — |
| Sarilumab | | mab | human | IL6 | rheumatoid |
| | | | | | arthritis, ankylosing |
| | | | | | spondylitis |
| Satumomab | | mab | mouse | TAG-72 | cancer (diagnosis) |
| pendetide | | | | | |
| Secukinumab | | mab | human | IL 17A | uveitis, rheumatoid |
| | | | | | arthritis psoriasis |
| Seribantumab | | mab | human | ERBB3 | cancer |
| | | | | (HER3) | |
| Setoxaximab | | mab | chimeric | E. coli shiga | — |
| | | | | toxin type-2 | |
| Sevirumab | | | human | cytomegalovirus | cytomegalovirus |
| | | | | | infection |
| SGN-CD19A | | mab | humanized | CD19 | acute |
| | | | | | lymphoblastic |
| | | | | | leukemia and B- |
| | | | | | cell non-Hodgkin |
| | | | | | lymphoma |
| SGN-CD33A | | mab | humanized | CD33 | Acute myeloid |
| | | | | | leukemia |
| Sibrotuzumab | | mab | humanized | FAP | cancer |
| Sifalimumab | | mab | humanized | IFN-α | SLE, |
| | | | | | dermatomyositis, |
| | | | | | polymyositis |
| Siltuximab | | mab | chimeric | IL-6 | cancer |
| Simtuzumab | | mab | humanized | LOXL2 | fibrosis |
| Siplizumab | | mab | humanized | CD2 | psoriasis, graft- |
| | | | | | versus-host disease |
| | | | | | (prevention) |
| Sirukumab | | mab | human | IL-6 | rheumatoid arthritis |
| Sofituzumab | | mab | humanized | CA-125 | ovarian cancer |
| vedotin | | | | | |
| Solanezumab | | mab | humanized | beta amyloid | Alzheimer's disease |
| Solitomab | | BiTE | mouse | EpCAM | — |
| Sonepcizumab | | — | humanized | sphingosine-1- | choroidal and |
| | | | | phosphate | retinal |
| | | | | | neovascularization |
| Sontuzumab | | mab | humanized | episialin | — |
| Stamulumab | | mab | human | myostatin | muscular dystrophy |
| Sulesomab | LeukoScan | Fab' | mouse | NCA-90 | osteomyelitis |
| | | | | (granulocyte | (imaging) |
| | | | | antigen) | |
| Suvizumab | | mab | humanized | HIV-1 | viral infections |
| Tabalumab | | mab | human | BAFF | B-cell cancers |
| Tacatuzumab | AFP-Cide | mab | humanized | alpha- | cancer |
| tetraxetan | | | | fetoprotein | |
| Tadocizumab | | Fab | humanized | integrin αIIbβ3 | percutaneous |
| | | | | | coronary |
| | | | | | intervention |
| Talizumab | | mab | humanized | IgE | allergic reaction |
| Tamtuvetmab | Tactress | mab | veterinary | CD52 | — |
| Tanezumab | | mab | humanized | NGF | pain |
| Taplitumomab | | mab | mouse | CD19 | cancer[citation |
| paptox | | | | | needed] |
| Tarextumab | | mab | human | Notch receptor | cancer |
| Tefibazumab | Aurexis | mab | humanized | clumping factor | Staphylococcus |
| | | | | A | aureus infection |
| Telimomab aritox | | Fab | mouse | — | — |
| Tenatumomab | | mab | mouse | tenascin C | cancer |
| Teneliximab | | mab | chimeric | CD40 | autoimmune |
| | | | | | diseases and |
| | | | | | prevention of organ |
| | | | | | transplant rejection |
| Teplizumab | | mab | humanized | CD3 | diabetes mellitus |
| | | | | | type 1 |
| Teprotumumab | | mab | human | IGF-1 receptor | hematologic tumors |
| | | | | (CD221) | |
| Tesidolumab | | mab | human | C5 | — |
| Tetulomab | | mab | humanized | CD37 | cancer[141] |
| Tezepelumab | | mab | human | TSLP | asthma, atopic |
| | | | | | dermatitis |
| TGN1412 | | — | humanized | CD28 | chronic |
| | | | | | lymphocytic |
| | | | | | leukemia, |
| | | | | | rheumatoid arthritis |
| Ticilimumab (= | | mab | human | CTLA-4 | cancer |
| tremelimumab) | | | | | |
| Tigatuzumab | | mab | humanized | TRAIL-R2 | cancer |
| Tildrakizumab | | mab | humanized | IL23 | immunologically |
| | | | | | mediated |
| | | | | | inflammatory |
| | | | | | disorders |
| Timolumab | | mab | human | AOC3 | — |
| Tisotumab vedotin | | mab | human | coagulation | — |
| | | | | factor III | |
| TNX-650 | | — | humanized | IL-13 | Hodgkin's |
| | | | | | lymphoma |
| Tocilizumab (= | Actemra, | mab | humanized | IL-6 receptor | rheumatoid arthritis |
| atlizumab) | RoActemra | | | | |
| Toralizumab | | mab | humanized | CD154 | rheumatoid |
| | | | | (CD40L) | arthritis, lupus |
| | | | | | nephritis etc. |
| Tosatoxumab | | mab | human | Staphylococcus | — |
| | | | | aureus | |
| Tositumomab | Bexxar | — | mouse | CD20 | follicular |
| | | | | | lymphoma |
| Tovetumab | | mab | human | CD 140a | cancer |
| Tralokinumab | | mab | human | IL-13 | asthma etc. |
| Trastuzumab | Herceptin | mab | humanized | HER2/neu | breast cancer |
| Trastuzumab | Kadcyla | mab | humanized | HER2/neu | breast cancer |
| emtansine | | | | | |
| TRBS07 | Ektomab | 3funct | — | GD2 | melanoma |
| | | | | ganglioside | |
| Tregalizumab | | mab | humanized | CD4 | — |
| Tremelimumab | | mab | human | CTLA-4 | cancer |
| Trevogrumab | | mab | human | growth | muscle atrophy due |
| | | | | differentiation | to orthopedic |
| | | | | factor 8 | disuse and |
| | | | | | sarcopenia |
| Tucotuzumab | | mab | humanized | EpCAM | cancer |
| celmoleukin | | | | | |
| Tuvirumab | | — | human | hepatitis B | chronic hepatitis B |
| | | | | virus | |
| Ublituximab | | mab | chimeric | MS4A1 | cancer |
| Ulocuplumab | | mab | human | CXCR4 | hematologic |
| | | | | (CD184) | malignancies |
| Urelumab | | mab | human | 4-1BB | cancer etc. |
| | | | | (CD137) | |
| Urtoxazumab | | mab | humanized | Escherichia | diarrhoea caused by |
| | | | | coli | E. coli |
| Ustekinumab | Stelara | mab | human | IL-12, IL-23 | multiple sclerosis, |
| | | | | | psoriasis, psoriatic |
| | | | | | arthritis |
| Utomilumab | | mab | human | 4-1BB | cancer |
| | | | | (CD137) | |
| Vadastuximab | | mab | chimeric | CD33 | — |
| talirine | | | | | |
| Vandortuzumab | | mab | humanized | STEAP1 | cancer |
| vedotin | | | | | |
| Vantictumab | | mab | human | Frizzled | cancer |
| | | | | receptor | |
| Vanucizumab | | mab | humanized | angiopoietin 2 | cancer |
| Vapaliximab | | mab | chimeric | AOC3 (VAP-1) | — |
| Varlilumab | | mab | human | CD27 | solid tumors and |
| | | | | | hematologic |
| | | | | | malignancies |
| Vatelizumab | | mab | humanized | ITGA2 | — |
| | | | | (CD49b) | |
| Vedolizumab | Entyvio | mab | humanized | integrin α4β7 | Crohn's disease, |
| | | | | | ulcerative colitis |
| Veltuzumab | | mab | humanized | CD20 | non-Hodgkin's |
| | | | | | lymphoma |
| Vepalimomab | | mab | mouse | AOC3 (VAP-1) | inflammation |
| Vesencumab | | mab | human | NRP1 | solid malignancies |
| Visilizumab | Nuvion | mab | humanized | CD3 | Crohn's disease, |
| | | | | | ulcerative colitis |
| Vobarilizumab | | mab | humanized | IL6R | inflammatory |
| | | | | | autoimmune |
| | | | | | diseases |
| Volociximab | | mab | chimeric | integrin α5β1 | solid tumors |
| Vorsetuzumab | | mab | humanized | CD70 | cancer |
| mafodotin | | | | | |
| Votumumab | HumaSPE | mab | human | tumor antigen | colorectal tumors |
| | CT | | | CTAA16.88 | |
| Xentuzumab | | mab | | IGF1, IGF2 | — |
| Zalutumumab | HuMax- | mab | human | EGFR | squamous cell |
| | EGFr | | | | carcinoma of the |
| | | | | | head and neck |
| Zanolimumab | HuMax- | mab | human | CD4 | rheumatoid |
| | CD4 | | | | arthritis, psoriasis, |
| | | | | | T-cell lymphoma |
| Zatuximab | | mab | chimeric | HER1 | cancer |
| Ziralimumab | | mab | human | CD147 | — |
| | | | | (basigin) | |
| Zolimomab aritox | | mab | mouse | CD5 | systemic lupus |
| | | | | | erythematosus, |
| | | | | | graft-versus-host |
| | | | | | disease |

TABLE 5

| Sponsors | Drug code | Trial IDs |
|---|---|---|
| Celltrion | CT-P63 | NCT05017168 |
| Exevir Bio BV | XVR011 | NCT04884295 |
| Jemincare Group | JMB2002 | ChiCTR2100042150 |
| Luye Pharma Group Ltd | LY-CovMab | NA |
| AbbVie | ABBV-47D11 | NCT04644120 |
| HiFiBiO Therapeutics | HFB30132A | NCT04590430 |
| Ology Bioservices | ADM03820 | NCT04592549 |
| Beigene | DXP604 | NCT04669262 |
| Zydus Cadila | ZRC-3308 | NA |
| Hengenix Biotech Inc | HLX70 | NCT04561076 |
| CORAT Therapeutics | COR-101 | NCT04674566 |
| Vir Biotechnol./ | VIR-7832 | NCT04746183 |
| AbCellera/Eli Lilly and | LY-CoV1404, | NCT04634409 |
| Company | LY3853113 | |
| Sorrento Therapeutics, | COVI-AMG (STI- | NCT04734860 |
| Inc. | 2020) | |
| Beigene | DXP593 | NCT04532294; |
| | | NCT04551898 |
| Junshi Biosciences/ | JS016, LY3832479, | NCT04441918; |
| Eli Lilly | LY-CoV016 | NCT04441931; |
| and Company | | NCT04427501 |
| Mabwell (Shanghai) | MW33 | NCT04533048; |
| Bioscience Co., Ltd. | | NCT04627584 |
| Toscana Life Sciences | MAD0004J08 | NCT04932850; |
| Sviluppo s.r.l. | | NCT04952805 |
| Bristol-Myers Squibb, | C144-LS and C-135-LS | NCT04700163; |
| Rockefeller University | | Activ-2 study |
| Sinocelltech Ltd. | SCTA01 | NCT04483375; |
| | | NCT04644185 |
| Adagio Therapeutics | ADG20 | NCT04805671 |
| | | NCT04859517 |
| Brii Biosciences | BRII-196 | NCT04479631; |
| | | Activ-3 study |
| Brii Biosciences | BRII-198 | NCT04479644; |
| | | Activ-3 study |
| Tychan Pte. Ltd. | TY027 | NCT04429529; |
| | | NCT04649515 |
| AstraZeneca | AZD7442 (AZD8895 + | NCT04507256; |
| | AZD1061) | NCT04625725; |
| | | NCT04625972 |
| Celltrion | CT-P59 | NCT04525079; |
| | | NCT04593641; |
| | | NCT04602000 |
| Vir Biotechnol./ | VIR-7831/ | NCT04545060; |
| Glaxo SmithKline | GSK4182136 | Activ-3 study |
| AbCellera/Eli Lilly and | LY-CoV555 | NCT04411628 (Phase |
| Company | (LY3819253); | 1); NCT04427501 |
| | | (Phase 2); |
| | combination of LY- | NCT04497987 |
| | CoV555 with LY- | (Phase 3); |
| | CoV016 (LY3832479) | NCT04501978 (Activ-3 study); |
| | | NCT04518410 (Phase 2/3) |
| Regeneron | REGN-COV2 | NCT04425629 (Phase |
| | (REGN10933 + | 1/2); NCT04426695 |
| | REGN10987) | (Phase |
| | | 1/2); NCT04452318 (Phase 3) |

[0283] In certain embodiments, an agent, such as an anti-inflammatory agent or bioactive lipid, is used to increase the expression level and/or duration of any the therapeutic protein (or biologically active nucleic acid molecules) expressed from the vectors in the methods herein. In certain embodiments, anti-inflammatory agents (AILs) and bioactive lipids in Table 6 below can be used in the compositions and pre-treatment solutions herein.

TABLE 6

| | | |
|---|---|---|
| Docosahexaenoic Acid | (DHA) | 3/10/15% |
| Eicosapenaenoic Acid | (EPA) | 10/15% |
| Alpha Linolenic Acid | (ALA) | 3/10/15% |
| Maresin 1 | (MAR1) | 3% |
| Lipoxin A4 | (LA4) | 2% |
| 15-deoxy-12,14-Prostaglandin J2 | (15d) | 3% |
| Arachidonic Acid | (AA) | 10/15% |
| Eicosatetraynoic Acid | (ETA) | 10% |
| Docosapentaenoic Acid | (DPA) | 10/15% |
| Stearidonic Acid | (SA) | 10% |
| Retinoic Acid | (RA) | 10% |
| Trans Retinal | (TA) | 10% |
| 2-Arachidonoyl Glycerol | (AG) | 10% |
| Diallyl Disulfide | (DADS) | 10% |
| 3,3-Diindolylmethane | (DIM) | 10% |
| Prostaglandin E2 | (PE2) | 10% |
| Oleic Acid | (OA) | 5/10/15/30/50% |
| Alpha Tocopherol | (AT) | 2.5% |
| Sphingosine-1-Phosphate | (S-1-P) | 10% |
| Palmitoyl Sphingomyelin | (SPH) | 10% |

TABLE 7
TABLE 7

| | | | | | Not | | | | |
|---|---|---|---|---|---|---|---|---|---|
| | Ab | | | Neutral- | Neutral- | | | SEQ | |
| | or | | Doesn't | ising | ising | Protein + | | ID | |
| Name | Nb | Binds to | Bind to | Vs | Vs | Epitope | Origin | NO.: | VH or VHH |
| 0304-2F8 | Ab | SARS-CoV2 | | | SARS-CoV2 | S; Unk | B-cells; SARS-CoV2 | 63 | EVQLVQSGAEVSQPGESLKISCKGSGYSF |
| | | (weak) | | | | | Human Patient | | TGYWISWVRQMPGKGLEWMGIIYPGD |
| | | | | | | | | | SDTKYTPSFQGQVTISTDKSINTAYLQWS |
| | | | | | | | | | SLKASDTAMYYCARRGDGLYYYGMDV |
| | | | | | | | | | WGQGTTVTVSS |
| 0304-3H3 | Ab | SARS-CoV2 | | SARS-CoV2 | | S; S2 | B-cells; SARS-CoV2 | 64 | EVQLVESGPGLVKPSETLSLTCTASGGSI |
| | | | | | | | Human Patient | | STYYWSWIRQPPGKGLEWIGYIYYSGST |
| | | | | | | | | | NYNPSLKSRVTISVDTSKNQFSLKLSSVT |
| | | | | | | | | | AADTAVYYCARDRIAPVGKFFGWYFDLW |
| | | | | | | | | | GRGTLVTVSS |
| 0304- | Ab | SARS-CoV2 | | | SARS-CoV2 | S; S2 | B-cells; SARS-CoV2 | 65 | EVQLVESGGGLVQPGGSLRLSCAASGFT |
| 4A10 | | | | | | | Human Patient | | FSTYAMHWVRQAPGKGLEYVSGISSNG |
| | | | | | | | | | GSTYYANSVKGRFTISRDNSKNTLYIQM |
| | | | | | | | | | GSLRAEDMAVYYCARSSSRGFDYWGQ |
| | | | | | | | | | GTLVTVSS |
| 0304-4A2 | Ab | SARS-CoV2 | | | SARS-CoV2 | S; S1 (non | B-cells; SARS-CoV2 | 66 | EVQLVESGPGLVKPSETLSLTCAVSGDST |
| | | | | | | RBD) | Human Patient | | SSSSSYWDWIRQPPGKGLEWIGNIYYTG |
| | | | | | | | | | TTYYNPSLKSRVTISVDTSKDQFSLKLSS |
| | | | | | | | | | VTAADTAVYYCARELFTAVAGKGGIDYW |
| | | | | | | | | | GQGTLVTVSS |
| 0317-A1 | Ab | SARS-CoV2 | | | SARS-CoV2 | S; S2 | B-cells; SARS-CoV2 | 67 | QVQLVQSGGGVVQPGRSLRLSCAAPGF |
| | | | | | | | Human Patient | | TFSSYGMHWVRQAPGKGLEWVAVISY |
| | | | | | | | | | DGSNKYYADSVKGRFTISRDNSKNTLYL |
| | | | | | | | | | QMNSLRAEDTAVYYCAKDFKGGSSSWY |
| | | | | | | | | | TPEIEYGMDVWGQGTTVTVSS |
| 0317-A2 | Ab | SARS-CoV2 | | | SARS-CoV2 | S; S2 | B-cells; SARS-CoV2 | 68 | QVQLVQSGSELKKPGASVKVSCKASGYT |
| | | | | | | | Human Patient | | FTSYAMNWVRQAPGQGLEWMGWINT |
| | | | | | | | | | NTGNPTYAQGFTGRFVFSLDTSVSTAYL |
| | | | | | | | | | QISSLKAEDTAVYYCARLIRHEAHTYCSG |
| | | | | | | | | | GSCYSPDYYYGMDVWGQGTMVTVSS |
| 0317-A3 | Ab | SARS-CoV2 | | | SARS-CoV2 | S; Link | B-cells; SARS-CoV2 | 69 | EVQLLQSGGGLVQPGGSLRLSCVASGFT |
| | | (weak) | | | | | Human Patient | | FSSYEMNWVRQAPGKGLEWVSYISTSG |
| | | | | | | | | | STINYADSVKGRFSISRDNAKKSLYLQM |
| | | | | | | | | | NSLRAEDTAVYYCASNPPLGEPYFDIWG |
| | | | | | | | | | QGTMVTVSS |
| 0317-A7 | Ab | SARS-CoV2 | | | SARS-CoV2 | S; S1 (non | B-cells; SARS-CoV2 | 70 | EVQLLESGGGVVQPGRSLRLSCAASGFT |
| | | | | | | RBD) | Human Patient | | FSNYAMHWVRQAPGKGLEWVAVISYD |
| | | | | | | | | | GSNKYYADSVKGRFTISRDNSKNTLYLQ |
| | | | | | | | | | MNSLRAEDTAVYYCARWGGGMQYLD |
| | | | | | | | | | VWGQGTTVTVSS |
| 0317-A8 | Ab | SARS-CoV2 | | | SARS-CoV2 | S; S1 (non | B-cells; SARS-CoV2 | 71 | EVQLVQSGSELKKPGASVKVSCKASGYT |
| | | (weak) | | | | RBD) | Human Patient | | FTSYAMNWVRQAPGQGLEWMGWINT |
| | | | | | | | | | NTGNPTYAQGFTGRFVFSLDTSVSTAYL |
| | | | | | | | | | QISSLKAEDTAVYYCARAGPNYDFWSGY |
| | | | | | | | | | YQTFDYWGQGTMVTVSS |
| 0317-A9 | Ab | SARS-CoV2 | | | SARS-CoV2 | S; Link | B-cells; SARS-CoV2 | 72 | EVQLVQSGAEVKKPGASVKVSCKVSGYT |
| | | (weak) | | | | | Human Patient | | LTELSMHWVRQAPGKGLEWMGGFDP |
| | | | | | | | | | EDGETIYAQKFQGRVTMTEDTSTDTAY |
| | | | | | | | | | MELSSLRSEDTAVYYCATATAMDGYYYY |
| | | | | | | | | | YGMDVWGQGTTVTVSS |
| 0317-B1 | Ab | SARS-CoV2 | | | SARS-CoV2 | S; Link | B-cells; SARS-CoV2 | 73 | EVQLVESGAEVKKPGESLKISCKGSGYSF |
| | | (weak) | | | | | Human Patient | | TSYWIGWVRQMPGEGLEWMGIIYPGD |
| | | | | | | | | | SDTRYSPSFQGQVTISADKSISTAYLQWS |
| | | | | | | | | | SLKASDTAMYYCASAGSSWYGDAFDIW |
| | | | | | | | | | GQGTMVTVSS |
| 0317-C4 | Ab | SARS-CoV2 | | | SARS-CoV2 | S; Link | B-cells; SARS-CoV2 | 74 | QVQLVQSGAEVKKPGASVKVSCKVSGC |
| | | (weak) | | | | | Human Patient | | TLTELSMHWVRQAPGKGLEWMGGFD |
| | | | | | | | | | PEDGETIYAQKFQGRVTMTEDTSTDTAY |
| | | | | | | | | | MELSSLRSEDTAVYYCATATIFGVANNW |
| | | | | | | | | | FDPWGQGTTVTVSS |
| 0317-C9 | Ab | SARS-CoV2 | | | SARS-CoV2 | S; S2 | B-cells; SARS-CoV2 | 75 | QVQLVQSGGGVVQPGRSLRLSCAASGF |
| | | | | | | | Human Patient | | TFSSYGMHWVRQAPGKGLEWVAVISY |
| | | | | | | | | | DGSNKYYADSVKGRFTISRDNSKNTLYL |
| | | | | | | | | | QMNSLRAEDTAVYYCAKDLGYYDILTGQ |
| | | | | | | | | | LGGYYYYYGMDVWGQGTTVTVSS |
| 10C10 | Ab | SARS-CoV2 | | | SARS-CoV2 | S; link | B-cells; SARS-CoV2 | 76 | QVQLVQSGGGLVQPGGSLRLSCAASGF |
| | | | | | | | Human Patient | | TFSSYWMSWVRQAPGKGLEWVANIN |
| | | | | | | | | | QDGSEKYYVDSVKGRFTISRDNAKNSLY |
| | | | | | | | | | LQMNSLRAEDTAVYYCARDWDYDILTG |
| | | | | | | | | | SWFGAFDIWGQGTMVTVSS |
| 1A09 | Ab | SARS-CoV2 | SARS-CoV1 | | SARS-CoV2 | S; RBD | Immunised Mouse | 77 | QVQLKESGPGLVAPSQSLSITCTVSGFSL |
| | | | | | | | | | TSYAISWVRQPPGKGLEWLGVIWTGGG |
| | | | | | | | | | TNYNSALKSRLSISKDNSKSQVFLKMNSL |
| | | | | | | | | | QTDDTARYYCARKDYYYGSSYAMDYWG |
| | | | | | | | | | QGTSVTVSS |
| 1A10 | Ab | SARS-CoV2 | MERS-CoV, | | SARS-CoV2 | S; RBD | Immunised Mouse | 78 | EVQLQQSGAELVRPGASVKLSCKASGYT |
| | | | SARS-CoV1 | | | | | | FSDYYINWVKQRPGQGLEWIARIYPGS |
| | | | | | | | | | GNTYYNEKFTGKATLTAEKSSSTAYMQL |
| | | | | | | | | | SSLTSEDSAVYFCARDYGSSYVDYFDYW |
| | | | | | | | | | GQGTTLTVSS |
| 1A12 | Ab | SARS-CoV2 | MERS-CoV, | SARS-CoV2 | | S; RBD | Immunised Mouse | 79 | EVQLQQSGAELVRPGASVKLSCTASGFN |
| | | | SARS-CoV1 | (weak) | | | | | IKDDYMHWVKQRPEQGLEWIGWINPE |
| | | | | | | | | | NGDTEYASKFQGKAAITADTSSNTACLQ |
| | | | | | | | | | LSSLTSEDTAVYYCSTGGYGNYVDAMDY |
| | | | | | | | | | WGQGTSVTVSS |
| 1B07 | Ab | SARS-CoV2 | MERS-CoV, | SARS-CoV2 | | S; RBD | Immunised Mouse | 80 | QVQLKESGPGLVAPSQSLSITCTVSGFSL |
| | | | SARS-CoV1 | | | | | | TSYAISWVRQPPGKGLEWLGVIWTGGG |
| | | | | | | | | | TNYNSALKSRLSISKDNSKSQVFLKMNSL |
| | | | | | | | | | QTDDTARYYCARKDYYGSSSNVMDYW |
| | | | | | | | | | GQGTSVTVSS |
| 1610 | Ab | SARS-CoV2 | MERS-CoV, | SARS-CoV2 | | S; RBD | Immunised Mouse | 81 | QVQLKESGPGLVAPSQSLSITCTVSGFSL |
| | | | SARS-CoV1 | | | | | | TNYAINWVRQPPGKGLEWLGVIWTGG |
| | | | | | | | | | GTNYNSALRSRLSISKDNSKSQVFLKMN |
| | | | | | | | | | SLHTDDTARYYCARKDYYGSSLAMDYW |
| | | | | | | | | | GQGTSVTVSS |
| 1C05 | Ab | SARS-CoV1, | MERS-CoV | SARS-CoV2 | | S; RBD | Immunised Mouse | 82 | EVQLQQSGPELVKPGASVKISCKASGYS |
| | | SARS-CoV2 | | (weak) | | | | | FTDYYMNWVKQSPEKSLEWIGEINPST |
| | | | | | | | | | GGPTYNQKFKAKATVTVDKSSSTAYMQ |
| | | | | | | | | | LKSLTSEDSAVYYCARRNYDLYYYAMDY |
| | | | | | | | | | WGQGTSVTVSS |
| 1C06 | Ab | SARS-CoV2 | MERS-CoV, | | SARS-CoV2 | S; RBD | Immunised Mouse | 83 | EVQLQQSGAELAKPGASVKLSCKASGYT |
| | | | SARS-CoV1 | | | | | | FTNYWMHWVKQRPGQGLEWIGYINPS |
| | | | | | | | | | SGYTKFNQKFNDKATLTADKSSTTAYMQ |
| | | | | | | | | | LSSPTYEDSAVYYCARSDYYGSSYVGYA |
| | | | | | | | | | MDYWGQGTSVTVSS |
| 1C07 | Ab | SARS-CoV1, | MERS-CoV | | SARS-CoV2 | S; RBD | Immunised Mouse | 84 | EVQLQQPGPELVKPGASVKISCKASGYS |
| | | SARS-CoV2 | | | | | | | FTDYYMNWVKQSPEKSLEWIGEINPST |
| | | | | | | | | | GGTSYNQKFKGKATLTVDKSSSTAYMQL |
| | | | | | | | | | KSLTSEDSAVYYCARRNYDLYYYAMDYW |
| | | | | | | | | | GQGTSVTVSS |
| 1D04 | Ab | SARS-CoV2 | MERS-CoV, | | SARS-CoV2 | S; RBD | Immunised Mouse | 85 | EVQLQQSGAELVRPGASVKLSCTASGFN |
| | | | SARS-CoV1 | | | | | | IKDDYMHWVKQRPEQGLEWIGWINPE |
| | | | | | | | | | NGDTEYASKFQGKAAITADTSSNTACLQ |
| | | | | | | | | | LSSLTSEDTAVYYCSTGGYGNYVDAMDY |
| | | | | | | | | | WGQGTSVTVSS |
| 1D05 | Ab | SARS-CoV2 | MERS-CoV, | | SARS-CoV2 | S; RBD | Immunised Mouse | 86 | QVQLKESGPGLVAPSQSLSITCTVSGFSL |
| | | | SARS-CoV1 | | | | | | TSYAISWVRQPPGKGLEWLGVIWTGGG |
| | | | | | | | | | TNYNSALKSRLSISKDNSKSQVFLKMNSL |
| | | | | | | | | | QTDDTARYYCARKDYYGSSSNVMDYW |
| | | | | | | | | | GQGTSVTVSS |
| 1E02 | Ab | SARS-CoV2 | MERS-CoV, | | SARS-CoV2 | S; RBD | Immunised Mouse | 87 | EVQLQQPGPELVKPGASVKISCKASGYS |
| | | | SARS-CoV1 | | | | | | FTDYYMNWVKQSPEKSLEWIGEINPST |
| | | | | | | | | | GGTSYNQKFKGKATLTVDKSSSTAYMQL |
| | | | | | | | | | KSLTSEDSAVYYCSRRNYDLYYYAMDYW |
| | | | | | | | | | GQGTSVTVSS |
| 1E07 | Ab | SARS-CoV2 | MERS-CoV, | SARS-CoV2 | | S; RBD | Immunised Mouse | 88 | EVQLQQSGPELVKPGASVKISCKASGYS |
| | | | SARS-CoV1 | | | | | | FTGYSMNWVKKSPEKSLEWIGEINPSTG |
| | | | | | | | | | GTTYNQKFKAKATLTVDKSSSTAYIQLKS |
| | | | | | | | | | LTSEDSAVYYCARGAGAYWGQGTLVTV |
| | | | | | | | | | SA |
| 1E10 | Ab | SARS-CoV2 | MERS-CoV, | | SARS-CoV2 | S; RBD | Immunised Mouse | 89 | EVQLQQSGPELVKPGASVKISCKASGYA |
| | | | SARS-CoV1 | | | | | | FSSSWMNWVKQRPGKGLEWIGRIYPG |
| | | | | | | | | | DGDTNYNGKFKGKATLTADKSSSTAYM |
| | | | | | | | | | QLSSLTSEDSAVYFCARDHGPAWFAYRG |
| | | | | | | | | | QGTLVTVSA |
| 1H06 | Ab | SARS-CoV2 | MERS-CoV, | | SARS-CoV2 | S; RBD | Immunised Mouse | 90 | EVQLQQSGPELVKPGASVKISCKASGYS |
| | | | SARS-CoV1 | | | | | | FTGYSMNWVKKSPEKSLEWIGEINPSTG |
| | | | | | | | | | GTTYNQKFKAKATLTVDKSSSTAYIQLKS |
| | | | | | | | | | LTSEDSAVYYCARGAGAYWGQGTLVTV |
| | | | | | | | | | SA |
| 1H10 | Ab | SARS-CoV2 | MERS-CoV, | SARS-CoV2 | | S; RBD | Immunised Mouse | 91 | QVQLKESGPGLVAPSQSLSITCTVSGFSL |
| | | | SARS-CoV1 | (weak) | | | | | TNYAISWVRQPPGKGLEWLGVIWTGG |
| | | | | | | | | | GTNYNSALKSRLSISKDNSKSQVFLKMN |
| | | | | | | | | | SLQTDDTARYYCARISYYDYEGVDYWGQ |
| | | | | | | | | | GTTLTVSS |
| 1M-1D2 | Ab | SARS-CoV2 | | SARS-CoV2 | | S; RBD | B-cells; SARS-CoV2 | 92 | QVQLVESGGGLVQPGGSLRLSCAASGF |
| | | | | | | | Human Patient | | TFSSYAMHWVRQAPGKGLEYVSAISGN |
| | | | | | | | | | GGSTYYAKSVKGRFTISRDNSKNTLYLQ |
| | | | | | | | | | MGSLRAEDMAVYYCARGAEYYDFWSG |
| | | | | | | | | | YYSAYFDYWGQGTLVTVSS |
| 2B04 | Ab | SARS-CoV2 | MERS-CoV, | SARS-CoV2 | | S; RBD | Immunised Mouse | 93 | QVQLKQSGPGLVAPSQSLSITCTVSGFSL |
| | | | SARS-CoV1 | | | | | | INYAISWVRQPPGKGLEWLGVIWTGGG |
| | | | | | | | | | TNYNSALKSRLSISKDNSKSQVFLKMNSL |
| | | | | | | | | | QTDDTARYYCARKDYYGRYYGMDYWG |
| | | | | | | | | | QGTSVTVSS |
| 2C02 | Ab | SARS-CoV1, | MERS-CoV | | SARS-CoV2 | S; RBD | Immunised Mouse | 94 | EVQLQQPGAELVKPGASVKVSCKASGYI |
| | | SARS-CoV2 | | | | | | | FTNYWMHWVKQRPGQGLEWIGRIHPS |
| | | | | | | | | | DSDTKYNQKFKGKATLTVDKSSSTAYMQ |
| | | | | | | | | | LSSLTSEDSAVYYCAILDSYWYFDVWGT |
| | | | | | | | | | GTTVTVSS |
| 2C03 | Ab | SARS-CoV2 | MERS-CoV, | SARS-CoV2 | | S; RBD | Immunised Mouse | 95 | EVQLQQSGPELVKPGASVKISCKASGYA |
| | | | SARS-CoV1 | (weak) | | | | | FSSSWMNWVKQRPGKGLEWIGRIYPG |
| | | | | | | | | | DGDTNYNGKLKGKATLTADKSSSTAYM |
| | | | | | | | | | QLSSLTSEDSAVYFCARKSYGYWHFDV |
| | | | | | | | | | WGTGTTVTVSS |
| 2C04 | Ab | SARS-CoV2 | MERS-CoV, | | SARS-CoV2 | S; RBD | Immunised Mouse | 96 | EVQLQQPGPELVKPGTSVKISCKASGYT |
| | | | SARS-CoV1 | | | | | | FTDYYMNWVKQSHGKSLEWIGDINPN |
| | | | | | | | | | NGGTNYNQKFKGKATLTVDKSSSTAYM |
| | | | | | | | | | ELRSLTSEDSAVCYCAAGKGDYWGQGT |
| | | | | | | | | | TLTVSS |
| 2D01 | Ab | SARS-CoV2 | MERS-CoV, | | SARS-CoV2 | S; RBD | Immunised Mouse | 97 | EVQLQQPGAELVKPGASVKVSCKASGYI |
| | | | SARS-CoV1 | | | | | | FTNYWMHWVKQRPGQGLEWIGRIHPS |
| | | | | | | | | | DSDTKYNQKFKGKATLTVDKSSSTAYMQ |
| | | | | | | | | | LSSLTSEDSAVYYCAILDSYWYFDVWGT |
| | | | | | | | | | GTTVTVSS |
| 2D08 | Ab | SARS-CoV2 | MERS-CoV, | SARS-CoV2 | | S; RBD | Immunised Mouse | 98 | EVQLQQSGPELVKPGTSVKISCKASGYTF |
| | | | SARS-CoV1 | (weak) | | | | | TDYYMNWVKQSHGKSLEWIGDINPNN |
| | | | | | | | | | GGTNYNQKFKGKATLTVDKSSSTAYMEL |
| | | | | | | | | | RSLTSEDSAVYYCAAGKGDYWGQGTTL |
| | | | | | | | | | TVSS |
| 2D11 | Ab | SARS-CoV2 | MERS-CoV, | | SARS-CoV2 | S; RBD | Immunised Mouse | 99 | EVQLQQSGPELVKPGASVKISCKASGYT |
| | | | SARS-CoV1 | | | | | | FTDYYMNWVKQSHGKSLEWIGDINPN |
| | | | | | | | | | NGGTSYNQKFKGKATLTVDKSSSTAYME |
| | | | | | | | | | LRSLTSEDSAVYYCARKGDGYYGGFAYW |
| | | | | | | | | | GQGTLVTVSA |
| 2E06 | Ab | SARS-CoV1, | MERS-CoV | SARS-CoV2 | | S; RBD | Immunised Mouse | 100 | EVQLQQSVADLVRPGASVKLSCTASGFN |
| | | SARS-CoV2 | | (weak) | | | | | IKNTYMHWVKQRPEQGLEWIGRIDPTN |
| | | | | | | | | | GDTKYVSKFQGKATITADTSSNTAYLQLS |
| | | | | | | | | | SLTSEDTAIYYCATYGSYYLYYYAMNYWG |
| | | | | | | | | | QGTSVTVSS |
| 2E10 | Ab | SARS-CoV1, | MERS-CoV | | SARS-CoV2 | S; RBD | Immunised Mouse | 101 | EVQLQQPGAELVRPGASVKLSCKASGYT |
| | | SARS-CoV2 | | | | | | | FTDYYINWVKQRPGQGLEWIARIYPGT |
| | | | | | | | | | GTTYYNEKFKGKATLTAEKSSSTAYMQLS |
| | | | | | | | | | SLTSEDSAVYFCARYDGNLYYYAMDYW |
| | | | | | | | | | GQGTSVTVSS |
| 2F04 | Ab | SARS-CoV2 | MERS-CoV, | | SARS-CoV2 | S; RBD | Immunised Mouse | 102 | EVQLQQPGAELVKPGASVKMSCKASGY |
| | | | SARS-CoV1 | | | | | | TFTSYWITWVKQRPGQGLEWIGDIYPG |
| | | | | | | | | | SGSTKYNEKFRSEATLTVDTSSTTAYMQL |
| | | | | | | | | | SSLTSEDSAVYYCARWDFYGSRTFDYWG |
| | | | | | | | | | QGTTLTVSS |
| 2H04 | Ab | SARS-CoV2 | MERS-CoV, | SARS-CoV2 | | S; RBD | Immunised Mouse | 103 | EVQLQQSGAELVKPGASVKMSCKASGY |
| | | | SARS-CoV1 | | | | | | TFTSYWITWVKQRPGQGLEWIGDIYPG |
| | | | | | | | | | SGSTKYNEKFRSEATLTVDTSSTTAYMQL |
| | | | | | | | | | SSLTSEDSAVYYCARWDFYGSRTFDYWG |
| | | | | | | | | | QGTTLTVSS |
| 2M- | Ab | SARS-CoV2 | | | SARS-CoV2 | S; RBD | B-cells; SARS-CoV2 | 104 | EVQLVESGGGLVQPGGSLRLSCAASGFT |
| 10B11 | | | | | | | Human Patient | | VSSNYMSWVRQAPGKGLEWVSVIYSG |
| | | | | | | | | | GSTYYADSVKGRFTISRDNSKNTLYLQM |
| | | | | | | | | | NSLRAEDTAVYYCARATWLRGVMDVW |
| | | | | | | | | | GQGTTVTVSS |
| 2M-12D7 | Ab | SARS-CoV2 | | | SARS-CoV2 | S; S2 | B-cells; SARS-CoV2 | 105 | EVQLVESGGGLVQPGRSLRLSCAASGFT |
| | | | | | | | Human Patient | | FDDYVMHWVRQAPGKGLEWVSGINW |
| | | | | | | | | | NSGSIGYADSVKGRFTISRDNAKNSLYLQ |
| | | | | | | | | | MNSLRAEDTALYYCAKDVRYCSSTSCYFS |
| | | | | | | | | | AFDIWGQGTMVTVSS |
| 2M-13A3 | Ab | SARS-CoV2 | | | SARS-CoV2 | S; S2 | B-cells; SARS-CoV2 | 106 | EVQLVESGGGVVQPGRSLRLSCAASGFT |
| | | | | | | | Human Patient | | FSGYAMHWVRQAPGKGLEWVAVISYD |
| | | | | | | | | | GSNKYYADSVKGRFTISRDNSKNTLYLQ |
| | | | | | | | | | MNSLRAEDTAVYYCARGGGSYYYWFDP |
| | | | | | | | | | WGQGTMVTVSS |
| 2M- | Ab | SARS-CoV2 | | | SARS-CoV2 | S; S2 | B-cells; SARS-CoV2 | 107 | EVQLVQWGAGLLKPSETLSLTCAVYGGS |
| 13D11 | | | | | | | Human Patient | | FSGYYWSWIRQPPGKGLEWIGEINHSG |
| | | | | | | | | | STNYNPSLKSRVTISVDTSKNQFSLKLSS |
| | | | | | | | | | VTAADTAVYYCARAGYSSSWYGVRGVDP |
| | | | | | | | | | WGQGTMVTVSS |
| 2M-14B2 | Ab | SARS-CoV2 | | | SARS-CoV2 | S; S2 | B-cells; SARS-CoV2 | 108 | QVQLLQSGGGVVQPGRSLRLSCAASGF |
| | | | | | | | Human Patient | | TFSTYGMHWVRQAPGKGLEWVAVISY |
| | | | | | | | | | DGSNKYYADSVKGRFTISRDNSKNTLYL |
| | | | | | | | | | QMNSLRAEDTAVYYCAKGSDIVVVPVG |
| | | | | | | | | | NWFDPWGQGTLVTVSS |
| 2M-14E4 | Ab | SARS-CoV2 | | | SARS-CoV2 | S; S2 | B-cells; SARS-CoV2 | 109 | QVQLQESGPGLVKPSETLSLACTVSGGS |
| | | | | | | | Human Patient | | VSSDNSYWSWIRQPPGKGLEWIGYTFH |
| | | | | | | | | | SGSANYNPSLKSRVTISVDTSKNQFSLKL |
| | | | | | | | | | SSVTAADTAVYYCARVQRYYPDSSGFYG |
| | | | | | | | | | RRFDIWGQGTLVTVSS |
| 2M-14E5 | Ab | SARS-CoV2 | | | SARS-CoV2 | S; S2 | B-cells; SARS-CoV2 | 110 | EVQLVESGGGVVQPGRSLRLSCAASGFT |
| | | | | | | | Human Patient | | FSTYSMHWVRQAPGKGLEWVAVISYD |
| | | | | | | | | | GSNKYYADSVKGRFTISRDNSKNTLYLQ |
| | | | | | | | | | VNSLRAEDTAVYYCARSGGGSYRGPFDY |
| | | | | | | | | | WGQGTLVTVSS |
| 2M-2D1 | Ab | SARS-CoV2 | | | SARS-CoV2 | S; S2 | B-cells; SARS-COV2 | 111 | EVQLVESGPGLVKPSETLSLTCTVSGGSI |
| | | | | | | | Human Patient | | SSSSYYWGWIRQPPGKGLEWIGSIYYSG |
| | | | | | | | | | STYYNPSLKSRVTISVDTSKNQFSLKLSS |
| | | | | | | | | | VTAADTAVYYSARGDRIQLWLLDAFDIW |
| | | | | | | | | | GQGTMVTVSS |
| 2M-2D4 | Ab | SARS-CoV2 | | | SARS-CoV2 | S; S2 | B-cells; SARS-CoV2 | 112 | EVQLVESGGGLVQPGGSLRLSCAASGFT |
| | | | | | | | Human Patient | | FSSYAMSWVRQAPGKGLEWVSAISGSG |
| | | | | | | | | | GSTYYADSVKGRFTISRDNSKNTLYLQM |
| | | | | | | | | | NSLRAEDTAVYYCAKIGLGLGGLLRRYFD |
| | | | | | | | | | YWGQGTLVTVSS |
| 2M-2G12 | Ab | SARS-CoV2 | | | SARS-CoV2 | S; S2 | B-cells; SARS-CoV2 | 113 | QVQLVESGGGLLKPGETLSLSCAASGFTF |
| | | | | | | | Human Patient | | SDYYWSWIRQAPGKGLEWIAVINHSGS |
| | | | | | | | | | TIYYPYPVKGVFIFSRDTANNFSLKLMN |
| | | | | | | | | | MMTSDTAVYYCGTRIMITWYSRRGMD |
| | | | | | | | | | GWGKGVTVTVSS |
| 2M-4G4 | Ab | SARS-CoV2 | | | SARS-CoV2 | S; RBD | B-cells; SARS-CoV2 | 114 | EVQLVESGAEVKKPGASVKVSCKASGYT |
| | | | | | | | Human Patient | | FTSYYIHWVRQAPGQGLEWMGVINPS |
| | | | | | | | | | GGSTTYAQKFQGRVTVTRDTSTSTVYM |
| | | | | | | | | | ELSSLRSEDTAVYYCARERGDSSGYYEII |
| | | | | | | | | | TTANRRFGMDVWGQGTTVTVSS |
| 2M-7E9 | Ab | SARS-CoV2 | | | SARS-CoV2 | S; S2 | B-cells; SARS-CoV2 | 115 | EVQLVESGAEVKKPGSSVKVSCKASGGT |
| | | | | | | | Human Patient | | FSSFAISWVRQAPGQGLEWMGGIIPIFD |
| | | | | | | | | | TTNYAQKFQGRVTITADESTRTAYMELS |
| | | | | | | | | | SLRSEDTAVYYCARIPGWDRGTDRNWN |
| | | | | | | | | | DDWGQGTTVTVSS |
| 2M-8E7 | Ab | SARS-CoV2 | | | SARS-CoV2 | S; S2 | B-cells; SARS-CoV2 | 116 | EVQLVESGAEVKKPGSSVKVSCKASGGT |
| | | | | | | | Human Patient | | FSSYAISWVRQAPGQGLEWMGGIIPIFG |
| | | | | | | | | | TANYAQKFQGRVTVTADESTSTAYMELS |
| | | | | | | | | | SLRSEDTAVYYCARTYSFDSSGYYYDYW |
| | | | | | | | | | GQGTMVTVSS |
| 2M-8H10 | Ab | SARS-CoV2 | | | SARS-CoV2 | S; S2 | B-cells; SARS-CoV2 | 117 | QVQLVESGGGVVLPGRSLRLSCAASGFT |
| | | | | | | | Human Patient | | FSTFAMHWVRQAPGKGLEWVAVISDE |
| | | | | | | | | | GSNKYYADSVKGRFTISRDNSRNTLYLQ |
| | | | | | | | | | MNSLRAEDTAVYYCARAFYDSNWSVGS |
| | | | | | | | | | YFDSWGQGTPVTVSS |
| 2M-9F10 | Ab | SARS-CoV2 | | | SARS-CoV2 | S; S2 | B-cells; SARS-CoV2 | 118 | EVQLLQSGGDLIQPGRSLRLSCAASGFSF |
| | | | | | | | Human Patient | | EDYAMHWVRQAPGQGLEWVSGISYN |
| | | | | | | | | | GGSIDYVDSVKGRFTISRDNAKNALYLE |
| | | | | | | | | | MNSLRPEDTAFYYCAKDSVRREYTHARV |
| | | | | | | | | | PFDNWGLGTLVTVSS |
| 2M-9H1 | Ab | SARS-CoV2 | | | SARS-CoV2 | S; S2 | B-cells; SARS-CoV2 | 119 | EVQLLESGGGVVQPGRSLRLSCVASGFN |
| | | | | | | | Human Patient | | FNNYGMHWVRQAPGKGLEWLAALSYE |
| | | | | | | | | | GSKEHYADSLKGRFTVSRDYSRATLHLH |
| | | | | | | | | | MNSLEPEDTAVYFCAKSSKIFYLGESREV |
| | | | | | | | | | DYWGRGTLVTVSS |
| 31B5 | Ab | SARS-CoV2 | | SARS-CoV2 | | S; RBD | B-cells; SARS-CoV2 | | ND |
| | | | | | | | Human Patient | | |
| 31B9 | Ab | SARS-CoV2 | | | SARS-CoV2 | S; RBD | B-cells; SARS-CoV2 | | ND |
| | | | | | | | Human Patient | | |
| 32D4 | Ab | SARS-CoV2 | | SARS-CoV2 | | S; RBD | B-cells; SARS-CoV2 | | ND |
| | | | | | | | Human Patient | | |
| 413-2 | Ab | SARS-CoV2 | SARS-CoV1 | SARS-CoV2 | SARS-CoV1 | S; non- | B-cells; SARS-CoV2 | | ND |
| | | | | | | RBD | Human Patient | | |
| 414-1 | Ab | SARS-CoV2 | SARS-CoV1 | SARS-CoV2 | SARS-CoV1 | S; RBD | B-cells; SARS-CoV2 | | ND |
| | | | | | | | Human Patient | | |
| 47D11 | Ab | SARS-CoV1, | | SARS-CoV2 | | S; RBD | B-cells; SARS-CoV1 | | ND |
| | | SARS-CoV2 | | and SARS- | | | Human Patient | | |
| | | | | CoV1 | | | | | |
| 4A8 | Ab | SARS-CoV2 | | SARS-CoV2 | | S; S1 (non | B-cells; SARS-CoV2 | 120 | EVQLVESGAEVKKPGASVKVSCKVSGYT |
| | | | | | | RBD) | Human Patient | | LTELSMHWVRQAPGKGLEWMGGFDP |
| | | | | | | | | | EDGETMYAQKFQGRVTMTEDTSTDTAY |
| | | | | | | | | | MELSSLRSEDTAVYYCATSTAVAGTPDLF |
| | | | | | | | | | DYYYGMDVWGQGTTVTVSS |
| 505-3 | Ab | SARS-CoV2 | SARS-CoV1 | SARS-CoV2 | SARS-CoV1 | S; RBD | B-cells; SARS-CoV2 | | ND |
| | | | | | | | Human Patient | | |
| 505-5 | Ab | SARS-CoV2 | SARS-CoV1 | SARS-CoV2 | SARS-CoV1 | S; RBD | B-cells; SARS-CoV2 | | ND |
| | | | | | | | Human Patient | | |
| 505-8 | Ab | SARS-CoV2 | SARS-CoV1 | SARS-CoV2 | SARS-CoV1 | S; non- | B-cells; SARS-CoV2 | | ND |
| | | | | | | RBD | Human Patient | | |
| 515-1 | Ab | SARS-CoV2 | SARS-CoV1 | SARS-CoV2 | SARS-CoV1 | S; RBD | B-cells; SARS-CoV2 | | ND |
| | | | | | | | Human Patient | | |
| 515-5 | Ab | SARS-CoV2 | SARS-CoV1 | SARS-CoV2 | SARS-CoV1 | S; non- | B-cells; SARS-CoV2 | | ND |
| | | | | | | RBD | Human Patient | | |
| 553-15 | Ab | SARS-CoV1, | | SARS-CoV1, | | S; RBD | B-cells; SARS-CoV2 | | ND |
| | | SARS-CoV2 | | SARS-CoV2 | | | Human Patient | | |
| 553-49 | Ab | SARS-CoV2 | SARS-CoV1 | SARS-CoV2 | SARS-CoV1 | S; RBD | B-cells; SARS-CoV2 | | ND |
| | | | | | | | Human Patient | | |
| 553-60 | Ab | SARS-CoV2 | SARS-CoV1 | SARS-CoV2 | SARS-CoV1 | S; RBD | B-cells; SARS-CoV2 | | ND |
| | | | | | | | Human Patient | | |
| 553-63 | Ab | SARS-CoV2 | SARS-CoV1 | SARS-CoV2 | SARS-CoV1 | S; RBD | B-cells; SARS-CoV2 | | ND |
| | | | | | | | Human Patient | | |
| 8D2 | Ab | SARS-CoV2 | | | SARS-CoV2 | S; S2 | B-cells; SARS-CoV2 | 121 | EVQLVESGGGLVQPGGSLRLSCAASGFT |
| | | | | | | | Human Patient | | FSSYWMSWVRQAPGKGLEWVANINQ |
| | | | | | | | | | DGSEKYYVDSVKGRFTISRDNAKNSLYL |
| | | | | | | | | | QVNSLRAEDTAVYYCARDWDYDILTGS |
| | | | | | | | | | WFGAFDIWGQGTTVTVSS |
| 8D9 | Ab | SARS-CoV2 | | | SARS-CoV2 | S; S2 | B-cells; SARS-CoV2 | 122 | EVQLLESGGGLVQPGGSLRLSCTASGFT |
| | | | | | | | Human Patient | | FSSYWMSWVRQAPGKGLEWVANIQQ |
| | | | | | | | | | DGSEKYYVDSVKGRFTISRDNAKNSLYL |
| | | | | | | | | | QMNSLRAEDTAVYYCARPTIGYSYGSDY |
| | | | | | | | | | WGQGTTVTVSS |
| 9A1 | Ab | SARS-CoV2 | | | SARS-CoV2 | S; S2 | B-cells; SARS-CoV2 | 123 | EVQLLESGGGVVQPGRSLRLSCVVSGFT |
| | | | | | | | Human Patient | | FNNYGMHWVRQAPGKGLEWVAVISYE |
| | | | | | | | | | GSVKYYGDHVDGRFTISRDPFKNTLYLH |
| | | | | | | | | | MNNLRPDDTAVYYCAKVSAIFWLGQGL |
| | | | | | | | | | SPIDVWGQGTTVTVSS |
| Ab_510A | Ab | SARS-CoV2 | | SARS-CoV2 | | S; RBD | B-cells; SARS-CoV2 | | ND |
| | | | | (weak) | | | Human Patient | | |
| Ab_510A5 | Ab | SARS-CoV2 | | | SARS-CoV2 | S; RBD | B-cells; SARS-CoV2 | | ND |
| | | | | | | | Human Patient | | |
| Ab_510D7 | Ab | SARS-CoV2 | | SARS-CoV2 | | S; RBD | B-cells; SARS-CoV2 | | ND |
| | | | | | | | Human Patient | | |
| Ab_510G | Ab | SARS-CoV2 | | SARS-CoV2 | | S; RBD | B-cells; SARS-CoV2 | | ND |
| | | | | | | | Human Patient | | |
| Ab_510H10 | Ab | SARS-CoV2 | | | | S; RBD | B-cells; SARS-CoV2 | | ND |
| | | | | | | | Human Patient | | |
| Ab_510H2 | Ab | SARS-CoV2 | | SARS-CoV2 | | S; RBD | B-cells; SARS-CoV2 | | ND |
| | | | | (weak) | | | Human Patient | | |
| Ab_510H | Ab | SARS-CoV2 | | SARS-CoV2 | | S; RBD | B-cells; SARS-CoV2 | | ND |
| | | | | | | | Human Patient | | |
| Ab_510H7 | Ab | SARS-CoV2 | | SARS-CoV2 | | S; RBD | B-cells; SARS-CoV2 | | ND |
| | | | | | | | Human Patient | | |
| Ab_511A1 | Ab | SARS-CoV2 | | | | S; RBD | B-cells; SARS-CoV2 | | ND |
| | | | | | | | Human Patient | | |
| Ab_511A5 | Ab | SARS-CoV2 | | SARS-CoV2 | | S; RBD | B-cells; SARS-CoV2 | | ND |
| | | | | | | | Human Patient | | |
| Ab_511B11 | Ab | SARS-CoV2 | | | | S; RBD | B-cells; SARS-CoV2 | | ND |
| | | | | | | | Human Patient | | |
| Ab_511B | Ab | SARS-CoV2 | | SARS-CoV2 | | S; RBD | B-cells; SARS-CoV2 | | ND |
| | | | | | | | Human Patient | | |
| Ab_511D11 | Ab | SARS-CoV2 | | | | S; RBD | B-cells; SARS-CoV2 | | ND |
| | | | | | | | Human Patient | | |
| Ab_511E5 | Ab | SARS-CoV2 | | | | S; RBD | B-cells; SARS-CoV2 | | ND |
| | | | | | | | Human Patient | | |
| Ab_511E7 | Ab | SARS-CoV2 | | | | S; RBD | B-cells; SARS-CoV2 | | ND |
| | | | | | | | Human Patient | | |
| Ab_511E9 | Ab | SARS-CoV2 | | | | S; RBD | B-cells; SARS-CoV2 | | ND |
| | | | | | | | Human Patient | | |
| Ab_511G5 | Ab | SARS-CoV2 | | | | S; RBD | B-cells; SARS-CoV2 | | ND |
| | | | | | | | Human Patient | | |
| Ab_511G7 | Ab | SARS-CoV2 | | SARS-CoV2 | | S; RBD | B-cells; SARS-CoV2 | | ND |
| | | | | | | | Human Patient | | |
| Ab_511H11 | Ab | SARS-CoV2 | | | | S; RBD | B-cells; SARS-CoV2 | | ND |
| | | | | | | | Human Patient | | |
| Ab_511H7 | Ab | SARS-CoV2 | | | | S; RBD | B-cells; SARS-CoV2 | | ND |
| | | | | | | | Human Patient | | |
| Ab_51A1 | Ab | SARS-CoV2 | | SARS-CoV2 | | S; RBD | B-cells; SARS-CoV2 | | ND |
| | | | | (weak) | | | Human Patient | | |
| Ab_51A3 | Ab | SARS-CoV2 | | | | S; RBD | B-cells; SARS-CoV2 | | ND |
| | | | | | | | Human Patient | | |
| Ab_51D2 | Ab | SARS-CoV2 | | SARS-CoV2 | | S; RBD | B-cells; SARS-CoV2 | | ND |
| | | | | | | | Human Patient | | |
| Ab_51D3 | Ab | SARS-CoV2 | | SARS-CoV2 | | S; RBD | B-cells; SARS-CoV2 | | ND |
| | | | | (weak) | | | Human Patient | | |
| Ab_51D4 | Ab | SARS-CoV2 | | SARS-CoV2 | | S; RBD | B-cells; SARS-CoV2 | | ND |
| | | | | (weak) | | | Human Patient | | |
| Ab_51D7 | Ab | SARS-CoV2 | | SARS-CoV2 | | S; RBD | B-cells; SARS-CoV2 | | ND |
| | | | | (weak) | | | Human Patient | | |
| Ab_51E10 | Ab | SARS-CoV2 | | SARS-CoV2 | | S; RBD | B-cells; SARS-CoV2 | | ND |
| | | | | (weak) | | | Human Patient | | |
| Ab_51E12 | Ab | SARS-CoV2 | | SARS-CoV2 | | S; RBD | B-cells; SARS-CoV2 | | ND |
| | | | | | | | Human Patient | | |
| Ab_51E7 | Ab | SARS-CoV2 | | SARS-CoV2 | | S; RBD | B-cells; SARS-CoV2 | | ND |
| | | | | | | | Human Patient | | |
| Ab_51F11 | Ab | SARS-CoV2 | | SARS-CoV2 | | S; RBD | B-cells; SARS-CoV2 | | ND |
| | | | | | | | Human Patient | | |
| Ab_52C1 | Ab | SARS-CoV2 | | | | S; RBD | B-cells; SARS-CoV2 | | ND |
| | | | | | | | Human Patient | | |
| Ab_52C6 | Ab | SARS-CoV2 | | SARS-CoV2 | | S; RBD | B-cells; SARS-CoV2 | | ND |
| | | | | | | | Human Patient | | |
| Ab_52F7 | Ab | SARS-CoV2 | | SARS-CoV2 | | S; RBD | B-cells; SARS-CoV2 | | ND |
| | | | | (weak) | | | Human Patient | | |
| Ab_52G9 | Ab | SARS-CoV2 | | SARS-CoV2 | | S; RBD | B-cells; SARS-CoV2 | | ND |
| | | | | | | | Human Patient | | |
| Ab_53C10 | Ab | SARS-CoV2 | | | | S; RBD | B-cells; SARS-CoV2 | | ND |
| | | | | | | | Human Patient | | |
| Ab_53C5 | Ab | SARS-CoV2 | | | | S; RBD | B-cells; SARS-COV2 | | ND |
| | | | | | | | Human Patient | | |
| Ab_53F12 | Ab | SARS-CoV2 | | SARS-CoV2 | | S; RBD | B-cells; SARS-CoV2 | | ND |
| | | | | (weak) | | | Human Patient | | |
| Ab_53F9 | Ab | SARS-CoV2 | | | | S; RBD | B-cells; SARS-CoV2 | | ND |
| | | | | | | | Human Patient | | |
| Ab_53H3 | Ab | SARS-CoV2 | | SARS-CoV2 | | S; RBD | B-cells; SARS-CoV2 | | ND |
| | | | | (weak) | | | Human Patient | | |
| Ab_55A8 | Ab | SARS-CoV2 | | SARS-CoV2 | | S; RBD | B-cells; SARS-CoV2 | | ND |
| | | | | (weak) | | | Human Patient | | |
| Ab_55C9 | Ab | SARS-CoV2 | | SARS-CoV2 | | S; RBD | B-cells; SARS-CoV2 | | ND |
| | | | | (weak) | | | Human Patient | | |
| Ab_56C12 | Ab | SARS-CoV2 | | SARS-CoV2 | | S; RBD | B-cells; SARS-CoV2 | | ND |
| | | | | | | | Human Patient | | |
| Ab_56D7 | Ab | SARS-CoV2 | | SARS-CoV2 | | S; RBD | B-cells; SARS-CoV2 | | ND |
| | | | | (weak) | | | Human Patient | | |
| Ab_56E1 | Ab | SARS-CoV2 | | SARS-CoV2 | | S; RBD | B-cells; SARS-CoV2 | | ND |
| | | | | | | | Human Patient | | |
| Ab_56H11 | Ab | SARS-CoV2 | | | | S; RBD | B-cells; SARS-CoV2 | | ND |
| | | | | | | | Human Patient | | |
| Ab_56H3 | Ab | SARS-CoV2 | | SARS-CoV2 | | S; RBD | B-cells; SARS-CoV2 | | ND |
| | | | | | | | Human Patient | | |
| Ab_57A6 | Ab | SARS-CoV2 | | SARS-CoV2 | | S; RBD | B-cells; SARS-CoV2 | | ND |
| | | | | | | | Human Patient | | |
| Ab_57A8 | Ab | SARS-CoV2 | | SARS-CoV2 | | S; RBD | B-cells; SARS-CoV2 | | ND |
| | | | | | | | Human Patient | | |
| Ab_57A9 | Ab | SARS-CoV2 | | SARS-CoV2 | | S; RBD | B-cells; SARS-CoV2 | | ND |
| | | | | | | | Human Patient | | |
| Ab_57B8 | Ab | SARS-CoV2 | | SARS-CoV2 | | S; RBD | B-cells; SARS-CoV2 | | ND |
| | | | | (weak) | | | Human Patient | | |
| Ab_57C4 | Ab | SARS-CoV2 | | SARS-CoV2 | | S; RBD | B-cells; SARS-CoV2 | | ND |
| | | | | | | | Human Patient | | |
| Ab_57E11 | Ab | SARS-CoV2 | | SARS-CoV2 | | S; RBD | B-cells; SARS-CoV2 | | ND |
| | | | | | | | Human Patient | | |
| Ab_57F7 | Ab | SARS-CoV2 | | SARS-CoV2 | | S; RBD | B-cells; SARS-CoV2 | | ND |
| | | | | (weak) | | | Human Patient | | |
| Ab_57G9 | Ab | SARS-CoV2 | | SARS-CoV2 | | S; RBD | B-cells; SARS-CoV2 | | ND |
| | | | | | | | Human Patient | | |
| Ab_58A4 | Ab | SARS-CoV2 | | | | S; RBD | B-cells; SARS-CoV2 | | ND |
| | | | | | | | Human Patient | | |
| Ab_58D2 | Ab | SARS-CoV2 | | | | S; RBD | B-cells; SARS-CoV2 | | ND |
| | | | | | | | Human Patient | | |
| Ab_58G1 | Ab | SARS-CoV2 | | SARS-CoV2 | | S; RBD | B-cells; SARS-CoV2 | | ND |
| | | | | | | | Human Patient | | |
| Ab_58G6 | Ab | SARS-CoV2 | | | SARS-CoV2 | S; RBD | B-cells; SARS-CoV2 | | ND |
| | | | | | | | Human Patient | | |
| Ab_59A2 | Ab | SARS-CoV2 | | | | S; RBD | B-cells; SARS-CoV2 | | ND |
| | | | | | | | Human Patient | | |
| Ab_59D6 | Ab | SARS-CoV2 | | | | S; RBD | B-cells; SARS-CoV2 | | ND |
| | | | | | | | Human Patient | | |
| Ab_81A11 | Ab | SARS-CoV2 | | | | S; RBD | B-cells; SARS-CoV2 | | ND |
| | | | | | | | Human Patient | | |
| Ab_81C3 | Ab | SARS-CoV2 | | SARS-CoV2 | | S; RBD | B-cells; SARS-CoV2 | | ND |
| | | | | (weak) | | | Human Patient | | |
| Ab_81C7 | Ab | SARS-CoV2 | | | | S; RBD | B-cells; SARS-CoV2 | | ND |
| | | | | | | | Human Patient | | |
| Ab_81C8 | Ab | SARS-CoV2 | | SARS-CoV2 | | S; RBD | B-cells; SARS-CoV2 | | ND |
| | | | | | | | Human Patient | | |
| Ab_81E1 | Ab | SARS-CoV2 | | SARS-CoV2 | | S; RBD | B-cells; SARS-CoV2 | | ND |
| | | | | (weak) | | | Human Patient | | |
| Ab_81E10 | Ab | SARS-CoV2 | | | | S; RBD | B-cells; SARS-CoV2 | | ND |
| | | | | | | | Human Patient | | |
| Ab_81F2 | Ab | SARS-CoV2 | | | | S; RBD | B-cells; SARS-CoV2 | | ND |
| | | | | | | | Human Patient | | |
| Ab_82B6 | Ab | SARS-CoV2 | | | | S; RBD | B-cells; SARS-CoV2 | | ND |
| | | | | | | | Human Patient | | |
| Ab_82C6 | Ab | SARS-CoV2 | | | | S; RBD | B-cells; SARS-CoV2 | | ND |
| | | | | | | | Human Patient | | |
| Ab_82F6 | Ab | SARS-CoV2 | | SARS-CoV2 | | S; RBD | B-cells; SARS-CoV2 | | ND |
| | | | | | | | Human Patient | | |
| Acharya | Ab | HIV | | | | S Glycans | B-cells; HIV Human | | Various |
| et al., | | Glycans, | | | | | Patient | | |
| 2020 | | SARS-CoV2 | | | | | | | |
| | | Glycans | | | | | | | |
| B38 | Ab | SARS-CoV2 | | SARS-CoV2 | | S; RBD | B-cells; SARS-CoV2 | 124 | EVQLVESGGGLVQPGGSLRLSCAASGF |
| | | | | | | | Human Patient | | VSSNYMSWVRQAPGKGLEWVSVIYSG |
| | | | | | | | | | GSTYYADSVKGRFTISRHNSKNTLYLQM |
| | | | | | | | | | NSLRAEDTAVYYCAREAYGMDVWGQG |
| | | | | | | | | | TTVTVSS |
| BD-236 | Ab | SARS-CoV2 | | SARS-CoV2 | | S; RBD | B-cells; SARS-CoV2 | 125 | EVQLVESGGGLIQPGGSLRLSCAASGITV |
| | | | | | | | Human Patient | | SSNYMSWVRQAPGKGLEWVSVIYSGG |
| | | | | | | | | | STDYADSVKGRFTISRDKSKNTLYLQMN |
| | | | | | | | | | SLRAEDTAVYYCARDLGEAGGMDVWG |
| | | | | | | | | | QGTTVTVSS |
| BD-368-2 | Ab | SARS-CoV2 | | SARS-CoV2 | | S; RBD | B-cells; SARS-CoV2 | | ND |
| | | | | | | | Human Patient | | |
| BD-494 | Ab | SARS-CoV2 | | SARS-CoV2 | | S; | Phage Display | | ND |
| | | | | | | probably | Library (Antibody, | | |
| | | | | | | RBD | human, immune - | | |
| | | | | | | (implied | CoV2) | | |
| | | | | | | by | | | |
| | | | | | | clustering) | | | |
| BD-498 | Ab | SARS-CoV2 | | SARS-CoV2 | | S; | Phage Display | | ND |
| | | | | | | probably | Library (Antibody, | | |
| | | | | | | RBD | human, immune - | | |
| | | | | | | (implied | CoV2) | | |
| | | | | | | by | | | |
| | | | | | | clustering) | | | |
| BD-500 | Ab | SARS-CoV2 | | SARS-CoV2 | | S; | B-cells; SARS-CoV2 | | ND |
| | | | | | | probably | Human Patient | | |
| | | | | | | RBD | | | |
| | | | | | | (implied | | | |
| | | | | | | by | | | |
| | | | | | | clustering) | | | |
| BD-503 | Ab | SARS-CoV2 | | SARS-CoV2 | | S; RBD | B-cells; SARS-CoV2 | | ND |
| | | | | | | | Human Patient | | |
| BD-504 | Ab | SARS-CoV2 | | SARS-CoV2 | | S; RBD | B-cells; SARS-CoV2 | | ND |
| | | | | | | | Human Patient | | |
| BD-505 | Ab | SARS-CoV2 | | SARS-CoV2 | | S; RBD | B-cells; SARS-CoV2 | | ND |
| | | | | | | | Human Patient | | |
| BD-506 | Ab | SARS-CoV2 | | SARS-CoV2 | | S; RBD | B-cells; SARS-CoV2 | | ND |
| | | | | | | | Human Patient | | |
| BD-507 | Ab | SARS-CoV2 | | SARS-CoV2 | | S; RBD | B-cells; SARS-CoV2 | | ND |
| | | | | | | | Human Patient | | |
| BD-508 | Ab | SARS-CoV2 | | SARS-CoV2 | | S; RBD | B-cells; SARS-CoV2 | | ND |
| | | | | | | | Human Patient | | |
| BD-515 | Ab | SARS-CoV2 | | SARS-CoV2 | | S; RBD | B-cells; SARS-CoV2 | | ND |
| | | | | | | | Human Patient | | |
| BD-604 | Ab | SARS-CoV2 | | SARS-CoV2 | | S; RBD | B-cells; SARS-CoV2 | 126 | EVQLVESGGGLIQPGGSLRLSCAASGIIV |
| | | | | | | | Human Patient | | SSNYMTWVRQAPGKGLEWVSVIYSGG |
| | | | | | | | | | STFYADSVKGRFTISRDNSKNTLYLQMSS |
| | | | | | | | | | LRAEDTAVYYCARDLGPYGMDVWGQG |
| | | | | | | | | | TTVTVSS |
| BD-629 | Ab | SARS-CoV2 | | SARS-CoV2 | | S; RBD | B-cells; SARS-CoV2 | 127 | EVQLVESGGGLIQPGGSLRLSCAASEFIV |
| | | | | | | | Human Patient | | SRNYMSWVRQAPGKGLEWVSVIYSGG |
| | | | | | | | | | STYYADSVKGRFTISRDNSKNTLNLQMN |
| | | | | | | | | | SLRAEDTAVYYCARDYGDYYFDYWGQG |
| | | | | | | | | | TLVTVSS |
| BD23 | Ab | SARS-CoV2 | | SARS-CoV2 | | S; RBD | B-cells; SARS-CoV2 | 128 | QVQLVQSGSELKKPGASVKVSCKASGYT |
| | | | | | | | Human Patient | | FTSYAMNWVRQAPGQGLEWMGWINT |
| | | | | | | | | | NTGNPTYAQGFTGRFVFSLDTSVSTAYL |
| | | | | | | | | | QISSLKAEDTAVYYCARPQGGSSWYRDY |
| | | | | | | | | | YYGMDVWGQGTTVTVSS |
| Bertoglio | Ab | SARS-CoV2 | | SARS-CoV2 | | S; RBD | Phage Display | | 17 |
| et al., | | | | | | | Library (Antibody, | | |
| 2020 | | | | | | | human, non- | | |
| | | | | | | | immune) | | |
| C002 | Ab | SARS-CoV2 | SARS-CoV1 | SARS-CoV2 | SARS-CoV1 | S; RBD | B-cells; SARS-CoV2 | 129 | EVQLVESGGGVVQPGRSLRLSCAASGFT |
| | | | | | | | Human Patient | | FSIYGMHWVRQAPGKGLEWVAVISYD |
| | | | | | | | | | GSNKYYADSVKGRFTISRDNSKNTLYLQ |
| | | | | | | | | | MNSLRAEDTAVYYCAKEGRPSDIVVVVA |
| | | | | | | | | | FDYWGQGTLVTVSS |
| C003 | Ab | SARS-CoV2 | SARS-CoV1 | SARS-CoV2 | SARS-CoV1 | S; RBD | B-cells; SARS-CoV2 | 130 | EVQLVESGGGLIQPGGSLRLSCAASGFT |
| | | | | (weak) | | | Human Patient | | VSSNYMSWVRQAPGKGLEWVSVIYSG |
| | | | | | | | | | GSTYYADSVKGRFTISRDNSKNTLYLQM |
| | | | | | | | | | NSLRAGDTAVYYCARDYGDFYFDYWGQ |
| | | | | | | | | | GTLVTVSS |
| C004 | Ab | SARS-CoV2 | SARS-CoV1 | SARS-CoV2 | SARS-CoV1 | S; RBD | B-cells; SARS-CoV2 | 131 | QVQLVQSGAEVKKPGASVKVSCKASGY |
| | | | | | | | Human Patient | | TFTGYYMHWVRQAPGQGLEWMGWI |
| | | | | | | | | | NPISGGTNYAQKFQGRVTMTRDTSISTA |
| | | | | | | | | | YMELSRLRSDDTAVYYCASPASRGYSGY |
| | | | | | | | | | DHGYYYYMDVWGKGTTVTVSS |
| C005 | Ab | SARS-CoV2 | SARS-CoV1 | SARS-CoV2 | SARS-CoV1 | S; RBD | B-cells; SARS-CoV2 | 132 | QVQLVQSGPEVKKPGTSVKVSCKASGFT |
| | | | | | | | Human Patient | | FTSSAVQWVRQARGQRLEWIGWIVVG |
| | | | | | | | | | SGNTNYAQKFQERVTITRDMSTSTAYM |
| | | | | | | | | | ELSSLRSEDTAVYYCAAPHCSGGSCLDAF |
| | | | | | | | | | DIWGQGTMVTVSS |
| C006 | Ab | SARS-CoV2 | SARS-CoV1 | SARS-CoV2 | SARS-CoV1 | S; RBD | B-cells; SARS-CoV2 | 133 | QVQLVESGGGLVKPGGSLRLSCAASGFI |
| | | | | (weak) | | | Human Patient | | FSDYCMSWIRRAPGKGLEWLSYISNSGT |
| | | | | | | | | | TRYYADSVKGRFTISRDNGRNSLYLQMD |
| | | | | | | | | | SLSAEDTAVYYCARRGDGSSSIYYYNYM |
| | | | | | | | | | DVWGKGTTVTVSS |
| C008 | Ab | SARS-CoV2 | SARS-CoV1 | SARS-CoV2 | SARS-CoV1 | S; RBD | B-cells; SARS-CoV2 | 134 | EVQLVESGGGVVQPGRSLRLSCAASGFT |
| | | | | (weak) | | | Human Patient | | FSSYGMHWVRQAPGKGLEWVTVISYD |
| | | | | | | | | | GRNKYYADSVKGRFTISRDNSKNTLYLQ |
| | | | | | | | | | MNSLRAEDTAVYYCAREFGDPEWYFDY |
| | | | | | | | | | WGQGTLVTVSS |
| C009 | Ab | SARS-CoV2 | SARS-CoV1 | SARS-CoV2 | SARS-CoV1 | S; RBD | B-cells; SARS-CoV2 | 135 | QVQLVQSGAEVKKPGASVKVSCMASGY |
| | | | | | | | Human Patient | | TFTGYYMHWVRQAPGQGLEWMGWI |
| | | | | | | | | | NPNSGGTNYAQKFQGRVTMTRDTSIST |
| | | | | | | | | | AYMELSRLRSDDTAVYYCARDSPFSALG |
| | | | | | | | | | ASNDYWGQGTLVTVSS |
| C010 | Ab | SARS-CoV2 | SARS-CoV1 | | SARS-CoV1, | S; RBD | B-cells; SARS-CoV2 | 136 | EVQLVESGGGVVQPGRSLRLSCAASGFT |
| | | | | | SARS-CoV2 | | Human Patient | | FSSYAMHWVRQAPAKGLEWVAVILYD |
| | | | | | | | | | GSGKYYADSVKGRFTISRDNSKNTLYLQ |
| | | | | | | | | | MNSLRAEDTAVYYCARDGIVDTALVTW |
| | | | | | | | | | FDYWGQGTLVTVSS |
| C013 | Ab | SARS-CoV2 | SARS-CoV1 | SARS-CoV2 | SARS-CoV1 | S; RBD | B-cells; SARS-CoV2 | 137 | QVQLVQSGAEVKKPGSSVKVSCKASGG |
| | | | | (weak) | | | Human Patient | | TFSSYAISWVRQAPGQGLEWMGGIIPIF |
| | | | | | | | | | GTANYAQKFQGRVTITADESTSTAYMEL |
| | | | | | | | | | SSLRSEDTAVYYCARGNRLLYCSSTSCYL |
| | | | | | | | | | DAVRQGYYYYYYMDVWGKGTTVTVSS |
| C016 | Ab | SARS-CoV2 | SARS-CoV1 | | SARS-CoV1, | S; RBD | B-cells; SARS-CoV2 | 138 | EVQLVESGGGVVQPGRSLRLSCAASGFT |
| | | | | | SARS-CoV2 | | Human Patient | | FSRYGMHWVRQAPGKGLEWVAVISYD |
| | | | | | | | | | GSNKYYADSVKGRFTISRDNSKNTLYLQ |
| | | | | | | | | | MNSLRAEDTAVYYCAKVTAPYCSGGSCY |
| | | | | | | | | | GGNFDYWGQGTLVTVSS |
| C017 | Ab | SARS-CoV2 | SARS-CoV1 | SARS-CoV2 | SARS-CoV1 | S; RBD | B-cells; SARS-CoV2 | 139 | EVQLVESGGGLVQPGRSLRLSCAASGFT |
| | | | | | | | Human Patient | | FDDYAMHWVRQAPGKGLEWVSGISW |
| | | | | | | | | | NSGTIGYADSVKGRFTISRDNAKNSLYLQ |
| | | | | | | | | | MNSLRAEDTAFYYCAKAGVRGIAAAGP |
| | | | | | | | | | DLNFDHWGQGTLVTVSS |
| C018 | Ab | SARS-CoV2 | SARS-CoV1 | | SARS-CoV1, | S; RBD | B-cells; SARS-CoV2 | 140 | EVQLVESGGGVVQPGRSLRLSCAASGFT |
| | | | | | SARS-CoV2 | | Human Patient | | FSNYAIHWVRQAPGKGLEWVAVISYDG |
| | | | | | | | | | SNKYYADSVKGRFTISRDNSKNTLYLQM |
| | | | | | | | | | NSLRAEDTAVYYCARDFDDSSFWAFDY |
| | | | | | | | | | WGQGTLVTVSS |
| C019 | Ab | SARS-CoV2 | SARS-CoV1 | | SARS-CoV1, | S; RBD | B-cells; SARS-CoV2 | 141 | QVQLVQSGAEVKKPGASVKVSCKASGY |
| | | | | | SARS-CoV2 | | Human Patient | | TFTSYYMHWVRQAPGQGLEWMGIINP |
| | | | | | | | | | SGGSTSYAQKFQGRVTMTRDTSTSTVY |
| | | | | | | | | | MELSSLRSEDTAVYYCARVPREGTPGFD |
| | | | | | | | | | PWGQGTLVTVSS |
| C021 | Ab | SARS-CoV2 | SARS-CoV1 | | SARS-CoV1, | S; RBD | B-cells; SARS-CoV2 | 142 | QVQLQESGPGLVKPSQTLSLTCTVSGGSI |
| | | | | | SARS-CoV2 | | Human Patient | | SSGGYYWSWIRQHPGKGLEWIGYIYYS |
| | | | | | | | | | GSTYYNPSLKSRVTISVDTSKNQFSLKLS |
| | | | | | | | | | SVTAADTAVYYCARVWQYYDSSGSFDYW |
| | | | | | | | | | GQGTLVTVSS |
| C022 | Ab | SARS-CoV1, | | SARS-CoV2 | | S; RBD | B-cells; SARS-CoV2 | 143 | QVQLQESGPGLVKPSETLSVTCTVSGGSI |
| | | SARS-CoV2 | | | | | Human Patient | | SSSRYYWGWIRQPPGKGLEWIGSIYYSG |
| | | | | | | | | | STYYNPSLKSRVTISVDTSKNQFSLKLSS |
| | | | | | | | | | VTAADTAVYYCARHAAAYYDRSGYYFIEY |
| | | | | | | | | | FQHWGQGTLVTVSS |
| C027 | Ab | SARS-CoV1 | | | SARS-CoV2 | S; RBD | B-cells; SARS-CoV2 | 144 | EVQLVESGGGVVQPGRSLRLSCAASGFT |
| | | (weak), | | | | | Human Patient | | FSSYGMHWVRQAPGKGLEWVAVISYD |
| | | SARS-CoV2 | | | | | | | GSNKYYADSVKGRFTISRDNSKNTLYLQ |
| | | | | | | | | | MNSLRAEDTAVYYCAKASGIYCSGGDCY |
| | | | | | | | | | SYYFDYWGQGTLVTVSS |
| C029 | Ab | SARS-CoV2 | SARS-CoV1 | | SARS-CoV1, | S; RBD | B-cells; SARS-CoV2 | 145 | QVQLQESGPGLVKPSQTLSLTCTVSGGSI |
| | | | | | SARS-CoV2 | | Human Patient | | SSGGYYWSWIRQHPGKGLEWIGYIYYS |
| | | | | | | | | | GSTYYNPSLKSRVTISVDTSKNQFSLKLS |
| | | | | | | | | | SVTAADTAVYYCARTMYYYDSSGSFDYW |
| | | | | | | | | | GQGTLVTVSS |
| C030 | Ab | SARS-CoV2 | SARS-CoV1 | | SARS-CoV1, | S; RBD | B-cells; SARS-CoV2 | 146 | EVQLVESGGGVVQPGRSLRLSCAASGFT |
| | | | | | SARS-CoV2 | | Human Patient | | FSSYGMHWVRQAPGKGLEWVAVISYD |
| | | | | | | | | | GSNKYYADSVKGRFTISRDNSKNTLYLQ |
| | | | | | | | | | MNSLRAEDTAVYYCAKASGIYCSGGNCY |
| | | | | | | | | | SYYFDYWGQGTLVTVSS |
| C031 | Ab | SARS-CoV2 | SARS-CoV1 | | SARS-CoV1, | S; RBD | B-cells; SARS-CoV2 | 147 | EVQLVESGGGLVQPGGSLRLSCAASGFT |
| | | | | | SARS-CoV2 | | Human Patient | | FSSYDMHWVRQATGKGLEWVSAIGTA |
| | | | | | | | | | GDTYYPGSVKGRFTISRENAKNSLYLQM |
| | | | | | | | | | NSLRAGDTAVYYCARVGYDSSGYSGWY |
| | | | | | | | | | FDLWGRGTLVTVSS |
| C101 | Ab | SARS-CoV2 | SARS-CoV1 | SARS-CoV2 | SARS-CoV1 | S; RBD | B-cells; SARS-CoV2 | 148 | QVQLVESGGGLIQPGGSLRLSCAASGFI |
| | | | | | | | Human Patient | | VSSNYMSWVRQAPGKGLEWVSVIYSG |
| | | | | | | | | | GSTFYTDSVKGRFTISRDNSKNTLYLQM |
| | | | | | | | | | NSLRAEDTAVYYCVRDYGDFYFDYWGQ |
| | | | | | | | | | GTLVTVSS |
| C102 | Ab | SARS-CoV2 | SARS-CoV1 | SARS-CoV2 | SARS-CoV1 | S; RBD | B-cells; SARS-CoV2 | 149 | QVQLVESGGGLIQPGGSLRLSCAASGFI |
| | | | | | | | Human Patient | | VSSNYMSWVRQAPGKGLEWVSVIYSG |
| | | | | | | | | | GSTFYADSVKGRFTISRDNSKNTLYLQM |
| | | | | | | | | | NSLRAEDTAVYYCARDYGDYYFDYWGQ |
| | | | | | | | | | GTLVTVSS |
| C103 | Ab | SARS-CoV2 | SARS-CoV1 | SARS-CoV2 | SARS-CoV1 | S; RBD | B-cells; SARS-CoV2 | 150 | QVQLQQWGAGLLKPSETLSLTCAVSGG |
| | | | | | | | Human Patient | | SLSGFYWTWIRQPPGKGLEWIGETNHF |
| | | | | | | | | | GSTGYKPSLKSRVTISVDMSRNQFSLKVT |
| | | | | | | | | | SVTAADTAVYYCARKPLLYSDFSPGAFDI |
| | | | | | | | | | WGQGTMVTVSS |
| C104 | Ab | SARS-CoV2 | SARS-CoV1 | SARS-CoV2 | SARS-CoV1 | S; RBD | B-cells; SARS-CoV2 | 151 | QVQLQQWGAGLLKPSETLSLSCAVYGG |
| | | | | | | | Human Patient | | SLSGYYWSWIRQPPGKGLEWIGEINHF |
| | | | | | | | | | GSTGYNPSLKSRVTISVDTSKSQFSVKLS |
| | | | | | | | | | SVTAADTAVYYCARKPLLYSNLSPGAFDI |
| | | | | | | | | | WGQGTMVTVSS |
| C105 | Ab | SARS-CoV2 | SARS-CoV1 | SARS-CoV2 | SARS-CoV1 | S; RBD | B-cells; SARS-CoV2 | 152 | QVQLVESGGGLIQPGGSLRLSCAASGFT |
| | | | | | | | Human Patient | | VSSNYMSWVRQAPGKGLEWVSVIYSG |
| | | | | | | | | | GSTYYADSVKGRFTISRDNSKNTLYLQM |
| | | | | | | | | | NSLRAEDTAVYYCARGEGWELPYDYWG |
| | | | | | | | | | QGTLVTVSS |
| C106 | Ab | SARS-CoV1, | | | SARS-CoV2 | S; RBD | B-cells; SARS-CoV2 | 153 | QLQLQESGPGLVKPSETLSLTCTVSGASV |
| | | SARS-CoV2 | | | | | Human Patient | | SSGSYYWSWIRQPPGKGLEWIGYIYYSG |
| | | | | | | | | | STNYNPSLKSRVTISVDTSKNQFSLKLSS |
| | | | | | | | | | VTAADTAVYYCARERPGGTYSNTWYTPT |
| | | | | | | | | | DTNWFDTWGQGTLVTVSS |
| C107 | Ab | SARS-CoV2 | SARS-CoV1 | | SARS-CoV1, | S; RBD | B-cells; SARS-CoV2 | 154 | QVQLVQSGAEVKKPGASVRVSCKASGY |
| | | | | | SARS-CoV2 | | Human Patient | | TFTSYGFSWVRQAPGQGLEWMGWISA |
| | | | | | | | | | YNGNTNFAQKLQGRVTMTTDTSTSTAY |
| | | | | | | | | | MELRSLRSDDTAVYYCARGEAVAGTTGF |
| | | | | | | | | | FDYWGQGTLVTVSS |
| C108 | Ab | SARS-CoV2 | SARS-CoV1 | SARS-CoV2 | SARS-CoV1 | S; RBD | B-cells; SARS-CoV2 | 155 | QVQLQESGPGLVKPSGTLSLTCAVSGGS |
| | | | | (weak) | | | Human Patient | | ISSTNWWSWVRQPPGKGLEWIGEIYHT |
| | | | | | | | | | GSTNYNPSLKSRVTISVDKSKNQFSLKLS |
| | | | | | | | | | SVTAADTAVYYCVRDGGRPGDAFDIWG |
| | | | | | | | | | QGTMVTVSS |
| C109 | Ab | SARS-CoV2 | | | | S; RBD | B-cells; SARS-CoV2 | 156 | EVQLVESGGGLVQPGGSLRLSCAASGFT |
| | | | | | | | Human Patient | | FSSYWMSWVRQAPGKGLEWVANIKQ |
| | | | | | | | | | DGSEKYYVDSVKGRFTISGDNAKNSLYL |
| | | | | | | | | | HMNSLRAEDTAVYYCAIQLWLRGGYDY |
| | | | | | | | | | WGQGTLVTVSS |
| C110 | Ab | SARS-CoV2 | SARS-CoV1 | SARS-CoV2 | SARS-CoV1 | S; RBD | B-cells; SARS-CoV2 | 157 | QVQLQQSGAEVKKPGESLKISCKGSGYS |
| | | | | | | | Human Patient | | FTSYWIGWVRQMPGKGLEWMGIIYPG |
| | | | | | | | | | DSDTRYSPSFQGQVTISADKSISTAYMQ |
| | | | | | | | | | WSSLKASDTAMYYCARSFRDDPRIAVA |
| | | | | | | | | | GPADAFDIWGQGTMVTVSS |
| C111 | Ab | SARS-CoV2 | | | | S; RBD | B-cells; SARS-CoV2 | 158 | QLQLQESGPGLVKPSETLSLTCTVSGGSI |
| | | | | | | | Human Patient | | SSYYWSWIRQPPGKGLEWIGYIYYSGST |
| | | | | | | | | | NYNPSLKSRVTISVDTSKNQFSLKLSSVT |
| | | | | | | | | | AADTAVYYCARVEDWGYCSSTNCYSGAF |
| | | | | | | | | | DIWGQGTMVTVSS |
| C112 | Ab | SARS-CoV2 | SARS-CoV1 | SARS-CoV2 | SARS-CoV1 | S; RBD | B-cells; SARS-CoV2 | 159 | QVQLVESGGGVVQPGRSLRLSCAASGF |
| | | | | (weak) | | | Human Patient | | TFSSHAMHWVRQAPGKGLEWVAVISY |
| | | | | | | | | | DGSNKYYADSVKGRFTISRDNSKNTLYL |
| | | | | | | | | | QMNSLRAEDTAVYYCAREDYYDSSGSF |
| | | | | | | | | | DYWGQGTLVTVSS |
| C113 | Ab | SARS-CoV2 | SARS-CoV1 | | SARS-CoV1, | S; RBD | B-cells; SARS-CoV2 | 160 | QVQLVESGGGVVQPGRSLRLSCAASGF |
| | | | | | SARS-CoV2 | | Human Patient | | TFSNFGMHWVRQAPGKGLEWVAVIW |
| | | | | | | | | | YDGSNKYYADSVKGRFTISRDNSKNTLYL |
| | | | | | | | | | QMNSLRAEDTAVYYCARGVNPDDILTG |
| | | | | | | | | | VDAFDIWGQGTMVTVSS |
| C114 | Ab | SARS-CoV2 | SARS-CoV1 | | SARS-CoV1, | S; RBD | B-cells; SARS-CoV2 | 161 | QVQLVESGGGLIQPGGSLKLSCVVSGFT |
| | | | | | SARS-CoV2 | | Human Patient | | VSKNYISWVRQAPGKGLEWVSVIFAGG |
| | | | | | | | | | STFYADSVKGRFAISRDNSNNTLFLQMN |
| | | | | | | | | | SLRVEDTAIYYCARGDGELFFDQWGQG |
| | | | | | | | | | TLVTVSS |
| C115 | Ab | SARS-CoV2 | SARS-CoV1 | SARS-CoV2 | SARS-CoV1 | S; RBD | B-cells; SARS-CoV2 | 162 | QVQLVESGGGLIKPGRSLRLSCTASGFTF |
| | | | | (weak) | | | Human Patient | | GDYAMTWFRQAPGKGLEWVGFIRSKA |
| | | | | | | | | | YGGTTGYAASVKYRFTISRDDSKSIAYLQ |
| | | | | | | | | | MDSLKTEDTAVYYCTRWDGWSQHDY |
| | | | | | | | | | WGQGTLVTVSS |
| C116 | Ab | SARS-CoV2 | SARS-CoV1 | | SARS-CoV1, | S; RBD | B-cells; SARS-CoV2 | 163 | QVQLVESGGGVVQPGRSLRLSCAASGF |
| | | | | | SARS-CoV2 | | Human Patient | | TYSTYAMHWVRQAPGKGLEWVAFISYD |
| | | | | | | | | | GSNKYYADSVKGRFTISRDNSKNTLYLQ |
| | | | | | | | | | MNSLRAEDTAVYYCARDFYHNWFDPW |
| | | | | | | | | | GQGTLVTVSS |
| C117 | Ab | SARS-CoV2 | SARS-CoV1 | SARS-CoV2 | SARS-CoV1 | S; RBD | B-cells; SARS-CoV2 | 164 | QVQLVESGGGVVQPGRSLRLSCAASGF |
| | | | | (weak) | | | Human Patient | | TFSTYAMHWVRQAPGEGLEWVAVISY |
| | | | | | | | | | DGSNTYYADSVKGRFTISRDNSKNTLYL |
| | | | | | | | | | QMNSLRAEDTAVYYCARDPIWFGELLSP |
| | | | | | | | | | PFVHFDYWGQGTLVTVSS |
| C118 | Ab | SARS-CoV1, | | SARS-CoV2 | | S; RBD | B-cells; SARS-CoV2 | 165 | QVQLVESGGGVVQPGRSLRLSCAASGF |
| | | SARS-CoV2 | | (weak) | | | Human Patient | | TFSNYAMHWVRQAPGKGLEWVAVISY |
| | | | | | | | | | DGSNKYYADSVKGRFTISRDNSKNTLYL |
| | | | | | | | | | QMNSLRAEDTAIYYCASGYTGYDYFVRG |
| | | | | | | | | | DYYGLDVWGQGTTVTVSS |
| C119 | Ab | SARS-CoV2 | SARS-CoV1 | SARS-CoV2 | SARS-CoV1 | S; RBD | B-cells; SARS-CoV2 | 166 | QVQLVQSGAEVKKPGASVKVSCKASGY |
| | | | | | | | Human Patient | | TFTSYYMHWVRQAPGQGLEWMGIINP |
| | | | | | | | | | SGGSTSYAQKLQGRVTMTRDTSTSTVY |
| | | | | | | | | | MELSSLRSEDTAVYYCARANHETTMDTY |
| | | | | | | | | | YYYYYMDVWGKGTTVTVSS |
| C120 | Ab | SARS-CoV2 | SARS-CoV1 | SARS-CoV2 | SARS-CoV1 | S; RBD | B-cells; SARS-CoV2 | 167 | EVQLVESGGGLIQPGGSLRLSCAASGFT |
| | | | | | | | Human Patient | | VSSNYMTWVRQAPGKGLEWVSLIYPG |
| | | | | | | | | | GSTYYADSVKGRFTISRDNSKNTLYLQM |
| | | | | | | | | | NSLRAEDTAVYYCAREGMGMAAAGTW |
| | | | | | | | | | GQGTLVTVSS |
| C121 | Ab | SARS-CoV2 | SARS-CoV1 | SARS-CoV2 | SARS-CoV1 | S; RBD | B-cells; SARS-CoV2 | 168 | QVQLVQSGAEVKKPGASVKVSCKASGY |
| | | | | | | | Human Patient | | TFTGYYMHWVRQAPGQGLEWMGWIS |
| | | | | | | | | | PVSGGTNYAQKFQGRVTMTRDTSISTAY |
| | | | | | | | | | MELSRLRSDDTAVYYCARAPLFPTGVLA |
| | | | | | | | | | GDYYYYGMDVWGQGTTVTVSS |
| C122 | Ab | SARS-CoV2 | SARS-CoV1 | SARS-CoV2 | SARS-CoV1 | S; RBD | B-cells; SARS-CoV2 | 169 | EVQLVESGGGLIQPGGSLRLSCAASGLT |
| | | | | | | | Human Patient | | VSSNYMSWVRQAPGKGLEWVSVLYSG |
| | | | | | | | | | GSSFYADSVKGRFTISRDNSKNTLYLQM |
| | | | | | | | | | NSLRAEDTAVYYCARESGDTTMAFDYW |
| | | | | | | | | | GQGTLVTVSS |
| C123 | Ab | SARS-CoV2 | SARS-CoV1 | SARS-CoV2 | SARS-CoV1 | S; RBD | B-cells; SARS-CoV2 | 170 | EVQLVESGGGLIQPGGSLRLSCAASGVT |
| | | | | | | | Human Patient | | VSRNYMSWVRQAPGKGLEWVSVIYSG |
| | | | | | | | | | GSTYYADSVKGRFTISRDNSKNTLYLQM |
| | | | | | | | | | NSLRAEDTAVYYCARDLSAAFDIWGQG |
| | | | | | | | | | TMVTVSS |
| C124 | Ab | SARS-CoV2 | SARS-CoV1 | SARS-CoV2 | SARS-CoV1 | S; RBD | B-cells; SARS-CoV2 | 171 | EVQLVESGGGLVQPGGSLRLSCAASGFT |
| | | | | (weak) | | | Human Patient | | FSGYSMNWVRQAPGKGPEWVSYISRSS |
| | | | | | | | | | STIYYADSVKGRFTISRDNAKNSLYLQMN |
| | | | | | | | | | SLRDEDTAVYYCAREGARVGATYDTYYF |
| | | | | | | | | | DYWGQGTLVTVSS |
| C125 | Ab | SARS-CoV2 | SARS-CoV1 | SARS-CoV2 | SARS-CoV1 | S; RBD | B-cells; SARS-CoV2 | 172 | QVQLVQSGPEVKKPGTSVKVSCKASGFT |
| | | | | | | | Human Patient | | FTSSAVQWVRQARGQRLEWIGWIVVG |
| | | | | | | | | | SGNTNYAQKFQERVTITRDMSTSTAYM |
| | | | | | | | | | ELSSLRSEDTAVYYCAAPYCSGGSCSDAF |
| | | | | | | | | | DIWGQGTMVTVSS |
| C126 | Ab | SARS-CoV2 | SARS-CoV1 | | SARS-CoV1, | S; RBD | B-cells; SARS-CoV2 | 173 | QVQLQESGPGLVKPSETLSLSCAVSGGSI |
| | | | | | SARS-CoV2 | | Human Patient | | GSYFWSWIRQPPGKGLEWIGYLHYSGS |
| | | | | | | | | | TNYNPSLKSRVTISVDTSKNQFSLKLSSV |
| | | | | | | | | | TAADTAVYYCARLQWLRGAFDIWGQGT |
| | | | | | | | | | MVTVSS |
| C127 | Ab | SARS-CoV2 | SARS-CoV1 | SARS-CoV2 | SARS-CoV1 | S; RBD | B-cells; SARS-CoV2 | 174 | QVQLVQSGAEVKKPGASVKVSCKASGY |
| | | | | | | | Human Patient | | TFTGYYMHWVRQAPGQGLEWMGWI |
| | | | | | | | | | NPNSGGTNYAQKFQGRVTMTRDTSIST |
| | | | | | | | | | AYMELSRLRSDDTAVYYCATAHPRRIQG |
| | | | | | | | | | VFFLGPGVWGQGTTVTVSS |
| C128 | Ab | SARS-CoV2 | SARS-CoV1 | SARS-CoV2 | SARS-CoV1 | S; RBD | B-cells; SARS-CoV2 | 175 | EVQLLESGGGLVQPGGSLRLSCAASGFT |
| | | | | | | | Human Patient | | FSTYAMSWVRQAPGKGLEWVSTITGSG |
| | | | | | | | | | RDTYYADSVKGRFTISRDNSKNTLFLQLN |
| | | | | | | | | | SLRAEDAAVYSCANHPLASGDDYYHYY |
| | | | | | | | | | MDVWGKGTTVTVSS |
| C130 | Ab | SARS-CoV2 | SARS-CoV1 | | SARS-CoV1, | S; RBD | B-cells; SARS-CoV2 | 176 | QVQLVQSGAEVKKPGASVKVSCKASGY |
| | | | | | SARS-CoV2 | | Human Patient | | TFTNYYMHWVRQAPGQGLEWMGIINP |
| | | | | | | | | | SGGSTGYAQKFQGRVTMTRDTSTSTVY |
| | | | | | | | | | MELSSLRSEDTAVYYCARSRPTPDWYFD |
| | | | | | | | | | LWGRGTLVTVSS |
| C131 | Ab | SARS-CoV2 | SARS-CoV1 | SARS-CoV2 | SARS-CoV1 | S; RBD | B-cells; SARS-CoV2 | 177 | QVQLVQSGSEVKKPGSSVKVSCKASGG |
| | | | | | | | Human Patient | | TFSSYAFSWVRQAPGQGLEWMGRIIPIL |
| | | | | | | | | | ALANYAQKFQGRVTITADKSTSTAYMEL |
| | | | | | | | | | SSLRSEDTAVYYCARVNQAVTTPFSMDV |
| | | | | | | | | | WGQGTTVTVSS |
| C132 | Ab | SARS-CoV2 | SARS-CoV1 | SARS-CoV2 | SARS-CoV1 | S; RBD | B-cells; SARS-CoV2 | 178 | QVQLQESGPGLVKPSGTLSLTCAVSGGS |
| | | | | (weak) | | | Human Patient | | ISSNNWWSCVRQPPGKGLEWIGEIYHS |
| | | | | | | | | | GSTNYNPSLKSRVTISVDKSKNQFSLKLS |
| | | | | | | | | | SVTAADTAVYYCARGGDTAMGPEYFDY |
| | | | | | | | | | WGQGTLVTVSS |
| C133 | Ab | SARS-CoV2 | SARS-CoV1 | | SARS-CoV1, | S; RBD | B-cells; SARS-CoV2 | 179 | QVQLVESGGGVVQPGRSLRLSCAASGF |
| | | | | | SARS-CoV2 | | Human Patient | | TFSSYAMHWVRQAPGKGLEWVAVILY |
| | | | | | | | | | DGSNKYYADSVKGRFTISRDNSKNTLYL |
| | | | | | | | | | QMNSLRAEDTAVYYCARDSDVDTSMVT |
| | | | | | | | | | WFDYWGQGTLVTVSS |
| C134 | Ab | SARS-CoV2 | SARS-CoV1 | | SARS-CoV1, | S; RBD | B-cells; SARS-CoV2 | 180 | EVQLLESGGGLVQPGGSLRLSCAASGFT |
| | | | | | SARS-CoV2 | | Human Patient | | FSNYAMSWVRQAPGKGLEWVSAISGS |
| | | | | | | | | | DGSTYYAGSVKGRFTISRDNSKNTLYLQ |
| | | | | | | | | | MNSLRAEDTAVYYCAKDPLITGPTYQYF |
| | | | | | | | | | HYWGQGTLVTVSS |
| C135 | Ab | SARS-CoV2 | SARS-CoV1 | SARS-CoV2 | SARS-CoV1 | S; RBD | B-cells; SARS-CoV2 | 181 | QVQLVESGGGVVQPGRSLRLSCAASGF |
| | | | | | | | Human Patient | | TFSSYAMHWVRQAPGKGLEWVAVIPF |
| | | | | | | | | | DGRNKYYADSVTGRFTISRDNSKNTLYL |
| | | | | | | | | | QMNSLRAEDTAVYYCASSSGYLFHSDY |
| | | | | | | | | | WGQGTLVTVSS |
| C138 | Ab | SARS-CoV2 | SARS-CoV1 | | SARS-CoV1, | S; RBD | B-cells; SARS-CoV2 | 182 | EVQLVESGGGLVQPGGSLRLSCAASGFT |
| | | | | | SARS-CoV2 | | Human Patient | | FSTYWMSWVRQPPGKGLEWVANIKQ |
| | | | | | | | | | DGSEKYYVDSVKGRFTISRDNAKNSLYL |
| | | | | | | | | | QMNSLRADDTAVYYCAGGTWLRSSFDY |
| | | | | | | | | | WGQGTLVTVSS |
| C139 | Ab | SARS-CoV2 | SARS-CoV1 | | SARS-CoV1, | S; RBD | B-cells; SARS-CoV2 | 183 | EVQLVESGGGVVQPGRSLRLSCAASGFT |
| | | | | | SARS-CoV2 | | Human Patient | | FSSYAMHWVRQAPGKGLEWVAVISYD |
| | | | | | | | | | GSNKYSADSVKGRFTISRDNSKNTLYLQ |
| | | | | | | | | | MNSLRAEDTAVYYCAKGGAYSYYYYMD |
| | | | | | | | | | VWGKGTTVTVSS |
| C140 | Ab | SARS-CoV2 | SARS-CoV1 | SARS-CoV2 | SARS-CoV1 | S; RBD | B-cells; SARS-CoV2 | 184 | EVQLVESGGGLVQPGGSLRLSCAASGVT |
| | | | | | | | Human Patient | | VSSNYMSWVRQAPGKGLEWVSLIYSGG |
| | | | | | | | | | STFYADSVKGRFTISRDNSENTLYLQMN |
| | | | | | | | | | TLRAEDTAVYYCARDLYYYGMDVWGQ |
| | | | | | | | | | GTTVTVSS |
| C141 | Ab | SARS-CoV2 | SARS-CoV1 | | SARS-CoV1, | S; RBD | B-cells; SARS-CoV2 | 185 | EVQLVESGGGVVQPGRSLRLSCAASGFT |
| | | | | | SARS-CoV2 | | Human Patient | | FSSYAMFWVRQAPGKGLEWVAVISYD |
| | | | | | | | | | GSNKYYADSVKGRFTISRDNSKNTLYLQ |
| | | | | | | | | | MNSLRAEDTAVYYCARADLGYCTNGVC |
| | | | | | | | | | YVDYWGQGTLVTVSS |
| C143 | Ab | SARS-CoV2 | SARS-CoV1 | | SARS-CoV1, | S; RBD | B-cells; SARS-CoV2 | 186 | EVQLVESGGGLVQPGGSLRLSCAASGFS |
| | | | | | SARS-CoV2 | | Human Patient | | VSTKYMTWVRQAPGKGLEWVSVLYSG |
| | | | | | | | | | GSDYYADSVKGRFTISRDNSKNALYLQM |
| | | | | | | | | | NSLRVEDTGVYYCARDSSEVRDHPGHP |
| | | | | | | | | | GRSVGAFDIWGQGTMVTVSS |
| C144 | Ab | SARS-CoV2 | SARS-CoV1 | SARS-CoV2 | SARS-CoV1 | S; RBD | B-cells; SARS-CoV2 | 187 | EVQLVESGGGLIQPGGSLRLSCAASGFT |
| | | | | | | | Human Patient | | VSNNYMSWVRQAPGKGLEWVSVIYSG |
| | | | | | | | | | GSTYYADSVKGRFTISRDKSKNTLYLQM |
| | | | | | | | | | NRLRAEDTAVYYCAREGEVEGYNDFWS |
| | | | | | | | | | GYSRDRYYFDYWGQGTLVTVSS |
| C145 | Ab | SARS-CoV2 | SARS-CoV1 | SARS-CoV2 | SARS-CoV1 | S; RBD | B-cells; SARS-CoV2 | 188 | EVQLVESGGGLIQPGGSLRLSCAASGFS |
| | | | | | | | Human Patient | | VSSNYMSWVRQAPGKGLEWVSVIYSG |
| | | | | | | | | | GSTYYADSVKGRFTISRDNSKNTLYLQM |
| | | | | | | | | | NSLRAEDTAVYYCAREGEVEGYYDFWS |
| | | | | | | | | | GYSRDRYYFDYWGQGTLVTVSS |
| C146 | Ab | SARS-CoV2 | SARS-CoV1 | | SARS-CoV1, | S; non- | B-cells; SARS-CoV2 | 189 | EVQLVESGGGLVKPGGSLRLSCAASGLT |
| | | | | | SARS-CoV2 | RBD | Human Patient | | FTAYRMNWVRQAPGKGLEWLSSISNTN |
| | | | | | | | | | GDIYYADSVKGRFTISRDNAKNSLYLQM |
| | | | | | | | | | NSLRADDTAVYYCARDVASNYAYFDLW |
| | | | | | | | | | GQGTLVTVSS |
| C147 | Ab | SARS-CoV2 | SARS-CoV1 | | SARS-CoV1, | S; non- | B-cells; SARS-CoV2 | 190 | EVQLVQSGAEVKKPGESLKISCKGSGYR |
| | | | | | SARS-CoV2 | RBD | Human Patient | | FTNYWIGWVRQMPGKGLEWMGIIYPG |
| | | | | | | | | | DSDTRYSPSFQGQVTISADKSITTAYLQW |
| | | | | | | | | | SSLKASDTAMYYCARLSDRWYSPFDPW |
| | | | | | | | | | GQGTLVTVSS |
| C148 | Ab | SARS-CoV2 | SARS-CoV1 | | SARS-CoV1, | S; RBD | B-cells; SARS-CoV2 | 191 | EVQLVESGGGLVQPGGSQRLSCAASGF |
| | | | | | SARS-CoV2 | | Human Patient | | TVSSNYMSWIRQAPGKGLEWVSVIYSG |
| | | | | | | | | | GSAYYVDSVKGRFTISRDNSKNTLYLQM |
| | | | | | | | | | NSLRPEDTAVYYCARIANYMDVWGKGT |
| | | | | | | | | | TVTVSS |
| C150 | Ab | SARS-CoV2 | SARS-CoV1 | | SARS-CoV1, | S; RBD | B-cells; SARS-CoV2 | 192 | EVQLVESGGGLVQPGGSLRLSCVASGFT |
| | | | | | SARS-CoV2 | | Human Patient | | FSSYWMHWVRQVPGKGPVWVSHINS |
| | | | | | | | | | EGSSTNYADSVRGRFTISRDNAKDTLYL |
| | | | | | | | | | QMNNLRAEDTAVYYCARPTAVAAAGN |
| | | | | | | | | | YFYYYGMDVWGQGTTVTVSS |
| C151 | Ab | SARS-CoV2 | SARS-CoV1 | SARS-CoV2 | SARS-CoV1 | S; RBD | B-cells; SARS-CoV2 | 193 | EVQLVESGGGLVKPGGSLRLSCAASGFT |
| | | | | (weak) | | | Human Patient | | FSSYNMNWVRQAPGKGLEWVSCISSSS |
| | | | | | | | | | SYIYYADSVKGRFTISRDNAKNSLYLQMN |
| | | | | | | | | | SLRAEDTAVYYCARERGYDGGKTPPFLG |
| | | | | | | | | | GQGTLVTVSS |
| C153 | Ab | SARS-CoV2 | SARS-CoV1 | SARS-CoV2 | SARS-CoV1 | S; RBD | B-cells; SARS-CoV2 | 194 | EVQLVESGGGLIQPGGSLRLSCAASGFT |
| | | | | (weak) | | | Human Patient | | VSSNYMSWVRQAPGKGLEWVSVIYSGY |
| | | | | | | | | | STYYVDSVKGRFTISRDNSKNTLYLQMN |
| | | | | | | | | | SLRAEDTAVYYCARVGGAHSGYDGSFDY |
| | | | | | | | | | WGQGTLVTVSS |
| C154 | Ab | SARS-CoV1, | | SARS-CoV2 | | S; RBD | B-cells; SARS-CoV2 | 195 | QVQLVESGGGVVQPGRSLRLSCAASGF |
| | | SARS-CoV2 | | (weak) | | | Human Patient | | TFSRYGMHWVRQAPGKGLEWVAVMS |
| | | | | | | | | | YDGSSKYYADSVKGRFTISRDNSKNTLCL |
| | | | | | | | | | QMNSLRAEDTAVYYCAKQAGPYCSGGS |
| | | | | | | | | | CYSAPFDYWGQGTLVTVSS |
| C155 | Ab | SARS-CoV2 | SARS-CoV1 | SARS-CoV2 | SARS-CoV1 | S; RBD | B-cells; SARS-CoV2 | 196 | EVQLVESGGGLIQPGGSLRLSCAASGFIV |
| | | | | | | | Human Patient | | SSNYMSWVRQAPGKGLEWVSVIYSGG |
| | | | | | | | | | STFYADSVKGRFTISRDNSKNTLYLQMN |
| | | | | | | | | | SLRAEDTAVYYCARDFGEFYFDYWGQG |
| | | | | | | | | | TLVTVSS |
| C156 | Ab | SARS-CoV2 | SARS-CoV1 | | SARS-CoV1, | S; RBD | B-cells; SARS-CoV2 | 197 | QVQLVESGGGVVQPGRSLRLSCAASGF |
| | | | | | SARS-CoV2 | | Human Patient | | TFSNYGMHWVRQAPGKGLEWVAVISY |
| | | | | | | | | | DGNNKYYADSVKGRFTISRDNSKNTLYL |
| | | | | | | | | | QMNSLRAEDTAVYYCAKDPFPLAVAGT |
| | | | | | | | | | GYFDYWGQGTLVTVSS |
| C164 | Ab | SARS-CoV2 | SARS-CoV1 | SARS-CoV2 | SARS-CoV1 | S; RBD | B-cells; SARS-CoV2 | 198 | EVQLVESGGGLVQPGGSLRLSCAASGFS |
| | | | | (weak) | | | Human Patient | | VSTKYMTWVRQAPGKGLEWVSVLYSG |
| | | | | | | | | | GSDYYADSVKGRFTISRDNSKNALYLQM |
| | | | | | | | | | NSLRVEDTGVYYCARDSSEVRDHPGHP |
| | | | | | | | | | GRSVGAFDIWGQGTMVTVSS |
| C165 | Ab | SARS-CoV2 | SARS-CoV1 | SARS-CoV2 | SARS-CoV1 | S; RBD | B-cells; SARS-CoV2 | 199 | QVQLVQSGAEVKKPGSSVKVSCKASGG |
| | | | | | | | Human Patient | | TFSSYAINWVRQAPGQGLEWMGRIIPI |
| | | | | | | | | | VGIANYAQKFQGRVTITADKSSSTAYME |
| | | | | | | | | | LSSLRSEDTAVYYCARDLLDPQLDDAFDI |
| | | | | | | | | | WGQGTMVTVSS |
| C201 | Ab | SARS-CoV2 | SARS-CoV1 | | SARS-CoV1, | S; RBD | B-cells; SARS-CoV2 | 200 | EVQLVESGGGLVQPGRSLRLSCAASGFT |
| | | | | | SARS-CoV2 | | Human Patient | | FDDYAMHWVRQAPGKGLEWVSGISW |
| | | | | | | | | | NSGSIGYADSVKGRFTISRDNAKNSLYLQ |
| | | | | | | | | | MNSLRAEDTALYYCVKGVEYSSSSNFDY |
| | | | | | | | | | WGQGTLVTVSS |
| C202 | Ab | SARS-CoV2 | SARS-CoV1 | | SARS-CoV1, | S; RBD | B-cells; SARS-CoV2 | 201 | EVQLVESGGGLVQPGGSLRLSCAASGFT |
| | | | | | SARS-CoV2 | | Human Patient | | VSSNYMSWVRQAPGKGLEWVSLIYSGG |
| | | | | | | | | | STYYADSVKGRFTISRDNSKNTLYLQMN |
| | | | | | | | | | SLRAEDTAVYYCARDTLGRGGDYWGQ |
| | | | | | | | | | GTLVTVSS |
| C204 | Ab | SARS-CoV1, | | | SARS-CoV2 | S; RBD | B-cells; SARS-CoV2 | 202 | EVQLLESGGGLEQPGGSLRLSCAASGFT |
| | | SARS-CoV2 | | | | | Human Patient | | FSTYAMSWVRQAPGKGLEWVSAISGSG |
| | | | | | | | | | AGTFYADSVKGRFTISRDNSKNTLYLQM |
| | | | | | | | | | NSLRAEDTAVYYCARESDCGSTSCYQVG |
| | | | | | | | | | WFDPWGQGTLVTVSS |
| C205 | Ab | SARS-CoV2 | SARS-CoV1 | | SARS-CoV1, | S; non- | B-cells; SARS-CoV2 | 203 | QVQLVQSGAEVKKPGASVKVSCKASGH |
| | | | | | SARS-CoV2 | RBD | Human Patient | | TFTSYYMHWVRQAPGQGLEWMGIINP |
| | | | | | | | | | SGGSTSYAQKFQGRVTMTRDTSTSTVY |
| | | | | | | | | | MELSSLRSEDTAVYYCARGPERGIVGAT |
| | | | | | | | | | DYFDYWGQGTLVTVSS |
| C207 | Ab | SARS-CoV2 | SARS-CoV1 | SARS-CoV2 | SARS-CoV1 | S; RBD | B-cells; SARS-CoV2 | 204 | EVQLLESGGGLVQPGGSLRLSCAASGFT |
| | | | | (weak) | | | Human Patient | | FSSYAMSWVRQAPGKGLEWVSAISGSG |
| | | | | | | | | | GSTYYADSVKGRFTISRDNSKNTLYLQM |
| | | | | | | | | | NSLRAEDTAVYYCAKEPIGQPLLWWDY |
| | | | | | | | | | WGQGTLVTVSS |
| C208 | Ab | SARS-CoV2 | SARS-CoV1 | | SARS-CoV1, | S; non- | B-cells; SARS-CoV2 | 205 | EVQLVQSGAEVKKPGESLKISCKGSGYSF |
| | | | | | SARS-CoV2 | RBD | Human Patient | | TSYWIGWVRQMPGKGLEWMGIIYPGD |
| | | | | | | | | | SDTRYSPSFQGQVTISADKSISTAYLKWS |
| | | | | | | | | | SLKASDSAMYYCARGPNLQNWFDPWG |
| | | | | | | | | | QGTLVTVSS |
| C210 | Ab | SARS-CoV2 | SARS-CoV1 | SARS-CoV2 | SARS-CoV1 | S; RBD | B-cells; SARS-CoV2 | 206 | EVQLVESGGGLIQPGGSLRLSCAASGFT |
| | | | | | | | Human Patient | | VSSNYMSWVRQAPGKGLEWVSVIYSG |
| | | | | | | | | | GSTFYADSVKGRFTFSRDNSKNTLYLQM |
| | | | | | | | | | NSLRAEDTAVYYCARDLMAYGMDVWG |
| | | | | | | | | | QGTTVTVSS |
| C211 | Ab | SARS-CoV2 | SARS-CoV1 | SARS-CoV2 | SARS-CoV1 | S; RBD | B-cells; SARS-CoV2 | 207 | EVQLVESGGGLVQPGGSLRLSCAASEFT |
| | | | | | | | Human Patient | | VSSNYMSWVRQAPGKGLEWVSVIYSG |
| | | | | | | | | | GSTFYADSVKGRFTISRDNSKNTLYLQM |
| | | | | | | | | | NSLRPEDTAVYYCARDYGDFYFDFWGQ |
| | | | | | | | | | GTLVTVSS |
| C212 | Ab | SARS-CoV2 | SARS-CoV1 | | SARS-CoV1, | S; non- | B-cells; SARS-CoV2 | 208 | QVQLVQSGAEVKKPGASVKVSCKASGY |
| | | | | | SARS-CoV2 | RBD | Human Patient | | TVTGYYIHWVRQAPGQGLEWMGWISP |
| | | | | | | | | | NSGGTNYAQKFQGWVTMTRDMSITTA |
| | | | | | | | | | YMELSRLRSDDTAVYYCARERYFDLGG |
| | | | | | | | | | MDVWGQGTTVTVSS |
| C214 | Ab | SARS-CoV2 | SARS-CoV1 | | SARS-CoV1, | S; RBD | B-cells; SARS-CoV2 | 209 | QVQLVESGGGVVQPGRSLRLSCAASGF |
| | | | | | SARS-CoV2 | | Human Patient | | TFSSYGMHWVRQAPGKGLEWVAAIWY |
| | | | | | | | | | DGSNKHYADSVKGRFTISRDNSKNTLYL |
| | | | | | | | | | QMNSLRAEDTAVYYCARDVGRVTTWF |
| | | | | | | | | | DPWGQGTLVTVSS |
| C215 | Ab | SARS-CoV1, | | | SARS-CoV2 | S; RBD | B-cells; SARS-CoV2 | 210 | EVQLLESGGGLVQPGGSLRLSCAASGFT |
| | | SARS-CoV2 | | | | | Human Patient | | FSSYAMSWVRQAPGKGLEWVSAITDSG |
| | | | | | | | | | DGTFYADSVKGRFTISRDNSKNTLYLQM |
| | | | | | | | | | NSLRAEDTAVYYCASEEDYSNYVGWFD |
| | | | | | | | | | PWGQGTLVTVSS |
| C216 | Ab | SARS-CoV2 | SARS-CoV1 | | SARS-CoV1, | S; RBD | B-cells; SARS-CoV2 | 211 | EVQLVESGGGLVQPGGSLRLSCAASGFT |
| | | | | | SARS-CoV2 | | Human Patient | | FSSYDMHWVRQATGKGLEWVSAIGTA |
| | | | | | | | | | GDTYYPDSVKGRFTISRENAKNSLYLQM |
| | | | | | | | | | NSLRAGDTAVYYCARDRGSSGWYGWY |
| | | | | | | | | | FDLWGRGTLVTVSS |
| CA1 | Ab | SARS-CoV2 | | SARS-CoV2 | | S; RBD | B-cells; SARS-CoV2 | 212 | EVQLVQSGAEVKKPGASVKVSCKASGYT |
| | | | | | | | Human Patient | | FTSYGISWVRQAPGQGLEWMGWISAY |
| | | | | | | | | | NGNTNYAQKLQGRVTMTTDTSTSTAY |
| | | | | | | | | | MELRSLRSDDTAVYYCAREGYCSGGSCY |
| | | | | | | | | | SGYYYYYGMDVWGQGTTVTVSS |
| CB6 | Ab | SARS-CoV2 | | SARS-CoV2 | | S; RBD | B-cells; SARS-CoV2 | 213 | EVQLVESGGGLVQPGGSLRLSCAASGFT |
| | | | | | | | Human Patient | | VSSNYMSWVRQAPGKGLEWVSVIYSG |
| | | | | | | | | | GSTFYADSVKGRFTISRDNSMNTLFLQM |
| | | | | | | | | | NSLRAEDTAVYYCARVLPMYGDYLDYW |
| | | | | | | | | | GQGTLVTVSS |
| CC12.1 | Ab | SARS-CoV2 | SARS-CoV1 | SARS-CoV2 | SARS-CoV1 | S; RBD | B-cells; SARS-CoV2 | 214 | EVQLVESGGGLIQPGGSLRLSCAASGLT |
| | | | | | | | Human Patient | | VSSNYMSWVRQAPGKGLEWVSVIYSG |
| | | | | | | | | | GSTFYADSVKGRFTISRDNSKNTLYLQM |
| | | | | | | | | | NSLRAEDTAVYYCARDLDVYGLDVWGQ |
| | | | | | | | | | GTTVTVSS |
| CC12.10 | Ab | SARS-CoV2 | SARS-CoV1 | SARS-CoV2 | SARS-CoV1 | S; RBD | B-cells; SARS-CoV2 | 215 | QVQLVQSGAEVKKPGASVKVSCKASGYI |
| | | | | | | | Human Patient | | YSGYFMHWVRQAPGQGLEWMGWISP |
| | | | | | | | | | DSGGANYAQTFQGRVTMTRDTSTTTAH |
| | | | | | | | | | MELSRLRSDDTAVYYCARGPRYSGTHFD |
| | | | | | | | | | YWGQGTLVTVSS |
| CC12.11 | Ab | SARS-CoV2 | SARS-CoV1 | SARS-CoV2 | SARS-CoV1 | S; RBD | B-cells; SARS-CoV2 | 216 | QVQLVQSGAEVKKPGASVKVSCKASGYI |
| | | | | | | | Human Patient | | FSGYYTHWVRQAPGQGLEWMGWISP |
| | | | | | | | | | DSGGTNYAQKFQGRVTMTRDTSITTAY |
| | | | | | | | | | VELSGLRSDDTAVYYCARGPRYSGTYFD |
| | | | | | | | | | YWGQGTLVTVSS |
| CC12.12 | Ab | SARS-CoV2 | SARS-CoV1 | SARS-CoV2 | SARS-CoV1 | S; RBD | B-cells; SARS-CoV2 | 217 | QVQLVQSGAEVKKPGASVKVSCKASGYI |
| | | | | | | | Human Patient | | YSGYYMHWVRQAPGQGLEWMGWISP |
| | | | | | | | | | DSGGTNYAQRFQGRVTMTRDTSTTTAY |
| | | | | | | | | | MELSRLRSDDTAVYYCARGPRYSGTYFD |
| | | | | | | | | | YWGQGTLVTVSS |
| CC12.13 | Ab | SARS-CoV2 | SARS-CoV1 | SARS-CoV2 | SARS-CoV1 | S; RBD | B-cells; SARS-CoV2 | 218 | EVQLVESGGGLIQPGGSLRLSCAASGFT |
| | | | | | | | Human Patient | | VSSNYMSWVRQAPGKGLEWVSVIYSG |
| | | | | | | | | | GSTYYADSVKGRFTISRDNSKNTLYLQM |
| | | | | | | | | | NSLRAEDTAVYYCARDPYGYSSIWDGQ |
| | | | | | | | | | GGHWGQGTLVTVSS |
| CC12.14 | Ab | SARS-CoV2 | SARS-CoV1 | SARS-CoV2 | SARS-CoV1 | S; RBD | B-cells; SARS-CoV2 | 219 | QVQLVESGGGLVKPGGSLRLSCAASGFT |
| | | | | | | | Human Patient | | FNYYSMNWVRQAPGKGLEWISSISTSSS |
| | | | | | | | | | FVYYADSVKGRFTISRDNAKTSLYLQMN |
| | | | | | | | | | SLRAEDTAVYFCARGGYCSDGSCYVQDR |
| | | | | | | | | | LIYYYSGLDVWGQGTTVTVSS |
| CC12.15 | Ab | SARS-CoV2 | SARS-CoV1 | SARS-CoV2 | SARS-CoV1 | S; RBD | B-cells; SARS-CoV2 | 220 | EVQLVESGGGLVQPGGSLRLSCAASGFT |
| | | | | | | | Human Patient | | FSTYEMNWVRQAPGKGLEWVSYISSSG |
| | | | | | | | | | STIYYADSVKGRFTISRDNAKNSLYLQMS |
| | | | | | | | | | SLRAEDTAIYYCARDRRRRYCTNGVCYR |
| | | | | | | | | | PEEIDYWGQGTLVTVSS |
| CC12.16 | Ab | SARS-CoV2 | SARS-CoV1 | SARS-CoV2 | SARS-CoV1 | S; RBD | B-cells; SARS-CoV2 | 221 | QVQLVESGGGVVQPGRSLRLSCAASGF |
| | | | | (weak) | | | Human Patient | | TFSSYGMHWVRQAPGKGLEWVALIWY |
| | | | | | | | | | DGSNKNYADSVKGRFTISRDNSKNTLDL |
| | | | | | | | | | QMNSLRAEDTAVYYCARDPFPGAVAGT |
| | | | | | | | | | GYLQYWGQGTLVTVSS |
| CC12.17 | Ab | SARS-CoV2 | SARS-CoV1 | SARS-CoV2 | SARS-CoV1 | S; RBD | B-cells; SARS-CoV2 | 222 | EVQLVESGGGVVQPGRSLRLSCAASGFT |
| | | | | (weak) | | | Human Patient | | FRNYGMHWVRQAPGKGLEGVAVISYD |
| | | | | | | | | | GSNKYYADSVKGRFTISRDNSKNTLYLQ |
| | | | | | | | | | MNSLRAEDTAVYYCAKSSGSYYYYYYGM |
| | | | | | | | | | DVWGQGTTVTVSS |
| CC12.18 | Ab | SARS-CoV1, | | SARS-CoV2 | SARS-CoV1 | S; RBD | B-cells; SARS-CoV2 | 223 | EVQLVQSGAEVKKPGASVKVSCKASGYT |
| | | SARS-CoV2 | | (weak) | | | Human Patient | | FTSYYMHWVRQAPGQGLEWMGIINPS |
| | | | | | | | | | GGSTSYAQKFQGRVTMTRDTSTSTVYM |
| | | | | | | | | | ELSSLRSEDTAVYYCARLHCGGDCYLDY |
| | | | | | | | | | WGQGTLVTVSS |
| CC12.19 | Ab | SARS-CoV2 | SARS-CoV1 | SARS-CoV2 | SARS-CoV1 | S; RBD | B-cells; SARS-CoV2 | 224 | EVQLLESGGGLVQPGGSLRLSCAASGFT |
| | | | | (weak) | | | Human Patient | | FSSYAMSWVRQAPGKGLEWVSAISGSG |
| | | | | | | | | | GSTYYADSVKGRFTISRDNSKNTLYLQM |
| | | | | | | | | | NSLRAEDTAVYYCAKGSGSGSYPNYYYY |
| | | | | | | | | | YGMDVWGQGTTVTVSS |
| CC12.2 | Ab | SARS-CoV2 | SARS-CoV1 | SARS-CoV2 | SARS-CoV1 | S; RBD | B-cells; SARS-CoV2 | 225 | EVQLVESGGGLIQPGGSLRLSCAASGFT |
| | | | | | | | Human Patient | | VSSNYMSWVRQAPGKGLEWVSVFYSG |
| | | | | | | | | | GSTYYADSVKGRFTISRDNSKNTLYLQM |
| | | | | | | | | | NSLRAEDTAVYYCARDYGDLYFDYWGQ |
| | | | | | | | | | GTLVTVSS |
| CC12.20 | Ab | SARS-CoV2 | SARS-CoV1 | | SARS-CoV1 | S; non- | B-cells; SARS-CoV2 | 226 | QVQLVESGGGVVQPGRSLRLSCAASGF |
| | | | | | | RBD | Human Patient | | TFSSYGMHWVRQAPGKGLEWVAVISY |
| | | | | | | | | | DGSNKYYADSVKGRFTISRDNSKNTLYL |
| | | | | | | | | | QMSSLRGEDTAVYYCAKDQAYYDILTGY |
| | | | | | | | | | LNPPKNYYYYGMDVWGQGTTVTVSS |
| CC12.21 | Ab | SARS-CoV2 | SARS-CoV1 | | SARS-CoV1 | S; non- | B-cells; SARS-CoV2 | 227 | QVQLVQSGAEVKKPGASVKVSCKVSGY |
| | | | | | | RBD | Human Patient | | TLTELSMHWVRQAPGKGLEWMGGFD |
| | | | | | | | | | PEDGETIYAQKFQGRVTMTEDTSTDTAY |
| | | | | | | | | | MDLSSLRSEDTAVYYCATAFSIFGVVPPD |
| | | | | | | | | | YWGQGTLVTVS |
| CC12.23 | Ab | SARS-CoV2 | SARS-CoV1 | SARS-CoV2 | SARS-CoV1 | S; non- | B-cells; SARS-CoV2 | 228 | QVQLQESGPGLVKPSETLSLTCTVSGGSI |
| | | | | (weak) | | RBD | Human Patient | | SSSSYYWGWIRQPPGKGLEWIGSIYYSG |
| | | | | | | | | | STYYNPSLKSRVTISVDTSKNQFSLKLSS |
| | | | | | | | | | VTAADTAVYYCARQGDCSTTSCAYDYWG |
| | | | | | | | | | QGTLVTVSS |
| CC12.24 | Ab | SARS-CoV2 | SARS-CoV1 | | SARS-CoV1 | S; link | B-cells; SARS-CoV2 | 229 | EVQLVESGGGVVQPGRSLRLSCSASGFT |
| | | | | | | | Human Patient | | FSIYGMHWVRQAPGKGLEWVAVISYD |
| | | | | | | | | | GSNKYYADSVKGRFTISRDNSKNTLYLQ |
| | | | | | | | | | MNSLRAEDTAVYYCAKDRTGNYYYGM |
| | | | | | | | | | DVWGQGTTVTVSS |
| CC12.25 | Ab | SARS-CoV1, | | | SARS-CoV1 | S; non- | B-cells; SARS-CoV2 | 230 | QVQLVESGGGLVQPGGSLRLSCAASGF |
| | | SARS-CoV2 | | | | RBD | Human Patient | | TFSSYAMSWVRQAPGKGLEWVSAISGS |
| | | | | | | | | | GDSTYYADSVKGRFTISRDNSKNTLYLQ |
| | | | | | | | | | MNSLRAEDTAVYYCAKDRYYEFWSGYS |
| | | | | | | | | | NWFDPWGQGTLVTISS |
| CC12.26 | Ab | SARS-CoV2 | SARS-CoV1 | | SARS-CoV1 | S; non- | B-cells; SARS-CoV2 | 231 | EVQLVQSGAEVKKPGESLKISCKGSGYSF |
| | | | | | | RBD | Human Patient | | TSYWIGWVRQMPGKGLEWMGIIYPGD |
| | | | | | | | | | SDTRYSPSFQGQVTVSADKSISTAYLQW |
| | | | | | | | | | SSLKASDTAMYYCARVNYYDSSGYPSFH |
| | | | | | | | | | FDYWGQGTLVTVS |
| CC12.27 | Ab | SARS-CoV1, | | | SARS-CoV1 | S; non- | B-cells; SARS-CoV2 | 232 | QVQLVQSGAEVKKPGASVKVSCKASGY |
| | | SARS-CoV2 | | | | RBD | Human Patient | | TFIGYYMHWVRQAPGQGLEWMGWIN |
| | | | | | | | | | PNSGGTNYAQKFQGRVTMTRDTSISTV |
| | | | | | | | | | YMELSRLRSDDTAVYYCAREMPAAMGY |
| | | | | | | | | | YYYGMDVWGQGTTVTVSS |
| CC12.28 | Ab | SARS-CoV1, | | SARS-CoV2 | | S; RBD | B-cells; SARS-CoV2 | 233 | EVQLLESGGGLVQPGGSLRLSCAASGFT |
| | | SARS-CoV2 | | and SARS- | | | Human Patient | | FSNYAMTWVRQAPGKGLEWVSAISSGS |
| | | | | CoV1 | | | | | GSTYYADSVKGRFTISRDNSKNTVYLQM |
| | | | | | | | | | NSLRAEDTAIYYCAKANKYSSSEFDFWG |
| | | | | | | | | | QGTLVTISS |
| CC12.3 | Ab | SARS-CoV2 | SARS-CoV1 | SARS-CoV2 | SARS-CoV1 | S; RBD | B-cells; SARS-CoV2 | 234 | QVQLVESGGGLIQPGGSLRLSCAASGFT |
| | | | | | | | Human Patient | | VSSNYMSWVRQAPGKGLEWVSVIYSG |
| | | | | | | | | | GSTFYADSVKGRFTISRDNSKSTLYLQM |
| | | | | | | | | | NSLRVEDTAVYYCARDFGDFYFDYWGQ |
| | | | | | | | | | GTLVTVSS |
| CC12.4 | Ab | SARS-CoV2 | SARS-CoV1 | SARS-CoV2 | SARS-CoV1 | S; RBD | B-cells; SARS-CoV2 | 235 | QVQLVQSGAEVKKPGASVKVSCKASGY |
| | | | | | | | Human Patient | | TFTGYYMHWVRQAPGQGLEWMGWIS |
| | | | | | | | | | PNSGGTNYAQKFQGWVTMTRDTSVST |
| | | | | | | | | | AYMELSRLRFDDTAVYYCATESWVYGS |
| | | | | | | | | | GSYSSGAFDIWGQGTMVTVSS |
| CC12.5 | Ab | SARS-CoV2 | SARS-CoV1 | SARS-CoV2 | SARS-CoV1 | S; RBD | B-cells; SARS-CoV2 | 236 | EVQLVQSGAEVKKPGASVKVSCKASGYI |
| | | | | | | | Human Patient | | YSGYYMHWVRQAPGQGLEWMGWISP |
| | | | | | | | | | DSGGTNYAQRFQGRVTMTRDTSTTTAY |
| | | | | | | | | | MELSRLRSDDTAMYYCARGPRYSGTYF |
| | | | | | | | | | DYWGQGTLVTVSS |
| CC12.6 | Ab | SARS-CoV2 | SARS-CoV1 | SARS-CoV2 | SARS-CoV1 | S; RBD | B-cells; SARS-CoV2 | 237 | QVQLVQSGAEVKKPGASVKVSCKASGY! |
| | | | | | | | Human Patient | | FSGYYMHWVRQAPGQGLEWMGWISP |
| | | | | | | | | | DSGGTNYAQKFQGRVTMTRDTSITTGY |
| | | | | | | | | | MELSGLRSDDTAVYYCARGPRYSGTYFD |
| | | | | | | | | | YWGQGTLVTVSS |
| CC12.7 | Ab | SARS-CoV2 | SARS-CoV1 | SARS-CoV2 | SARS-CoV1 | S; RBD | B-cells; SARS-CoV2 | 238 | EVQLVQSGAEVKKPGASVKVTCKTSGYI |
| | | | | | | | Human Patient | | FSGYYMHWVRQVPGQGLEWMGWISP |
| | | | | | | | | | DSGATNYAQKFQGRVTMTRDTSITTSYV |
| | | | | | | | | | ELTWLKSDDTAVYYCARGPRYSGTYFDF |
| | | | | | | | | | WGQGTLVTVSS |
| CC12.8 | Ab | SARS-CoV2 | SARS-CoV1 | SARS-CoV2 | SARS-CoV1 | S; RBD | B-cells; SARS-CoV2 | 239 | QVQLVQSGAEVKKPGASVKVSCKASGYI |
| | | | | | | | Human Patient | | FSGYYTHWVRQAPGQGLEWMGWISP |
| | | | | | | | | | DSGGTNYAQKFQGRVTMTRDTSITTAY |
| | | | | | | | | | VELSGLRSDDTAVYYCARGPRYSGTYFD |
| | | | | | | | | | YWGQGTLVTVSS |
| CC12.9 | Ab | SARS-CoV2 | SARS-CoV1 | SARS-CoV2 | SARS-CoV1 | S; non- | B-cells; SARS-CoV2 | 240 | EVQLVQSGAEVKKPGASVKVSCKASGYI |
| | | (weak) | | | | RBD | Human Patient | | FSGYYMHWVRQAPGQGLEWMGWISP |
| | | | | | | | | | DSGGTNYAQNFQGRVTMTRDTSISTGY |
| | | | | | | | | | MELSRLRSDDTAMYYCARGPRYSGTYF |
| | | | | | | | | | DYWGQGVLVTVSS |
| CC6.29 | Ab | SARS-CoV2 | | SARS-CoV2 | | S; RBD | B-cells; SARS-CoV2 | 241 | QVQLVQSGSELKKPGASVKVSCKASGYT |
| | | | | | | | Human Patient | | FATYALNWVRQAPGQGLEWMGWVNT |
| | | | | | | | | | NTGSPTYAQGFTGRFVFSFDTSVSTAYL |
| | | | | | | | | | QIRTLKAEDTAVYYCAVYYYDSGSPGWF |
| | | | | | | | | | DPWGQGTLVTVSS |
| CC6.30 | Ab | SARS-CoV2 | | SARS-CoV2 | | S; RBD | B-cells; SARS-CoV2 | 242 | QVQLVQSGAEVKKPGSSVKVSCKASGG |
| | | | | | | | Human Patient | | TFSIYAITWVRQAPGQGLEWMGGIIPII |
| | | | | | | | | | GTANYAQKFQGRVTITADKSTSTAYMEL |
| | | | | | | | | | SSLRSEDTAVYYCARDFRYCSSTRCYFWF |
| | | | | | | | | | DPWGQGTLVTVSS |
| CC6.31 | Ab | SARS-CoV2 | | SARS-CoV2 | | S; RBD | B-cells; SARS-CoV2 | 243 | EVQLVQSGAEVKKPGASVKVSCMASGY |
| | | | | | | | Human Patient | | TFTSYYMHWVRQAPGQGLEWMGIISP |
| | | | | | | | | | SGGGTSYAQKFQGRVTLTRDTSTSTVYM |
| | | | | | | | | | ELSSLRSEDTAVYYCARWYDSTGSIDYW |
| | | | | | | | | | GQGTLVTVSS |
| CC6.32 | Ab | SARS-CoV1, | | SARS-CoV2 | | S; RBD | B-cells; SARS-CoV2 | 244 | EVQLVESGGGLVQPGRSLRLSCAASGFT |
| | | SARS-CoV2 | | | | | Human Patient | | FDDYAMHWVRQAPGKGLEWVSGISW |
| | | | | | | | | | NSGSIAFAGSVKGRFTISRDNAKNSLYLQ |
| | | | | | | | | | MNSLRAEDTALYYCAKDQGYSYGNYFD |
| | | | | | | | | | YWGQGTLVTVSS |
| CC6.33 | Ab | SARS-CoV1, | | SARS-CoV2 | | S; RBD | B-cells; SARS-CoV2 | 245 | QVQLVQSGAEVKKPGSSVKVSCKASGG |
| | | SARS-CoV2 | | and SARS- | | | Human Patient | | TFSSSAISWVRQAPGQGLEWMGGIIPIL |
| | | | | CoV1 | | | | | DITNYAQKFQGRVTITADKSTSTAFMELS |
| | | | | | | | | | SLRSEDTAVYYCALRNQWDLLVYWGQG |
| | | | | | | | | | TLVTVSS |
| Clone11- | Ab | SARS-CoV2 | | | | S; RBD | Immunised Mouse | 246 | QVQLQQPGAELVMPGASVKMSCKASG |
| 9 | | | | | | | | | YTFTDYWMHWVKQRPGQGLEWIGAE |
| | | | | | | | | | DTSDSYTSYNQKFKGKATLTVDESSSTAY |
| | | | | | | | | | MQLSSLTSEDSAVYYCARRGYGSSYTWF |
| | | | | | | | | | AYWGQGTLVTVSA |
| CnC2t1p1_ | Ab | SARS-CoV2 | | | SARS-CoV2 | S; link | B-cells; SARS-CoV2 | 247 | QVQLVQSGAEVKKPGSSVKVSCKASGG |
| B10 | | | | | | | Human Patient | | TFSSYAISWVRQAPGQGLEWMGGIIPIF |
| | | | | | | | | | GTANYAQKFQGRVTITADKSTSTAYMEL |
| | | | | | | | | | SSLRSEDTAVYYCARVSGYDSSGYWGDY |
| | | | | | | | | | WGQGTLVTVSS |
| CnC2t1p1_ | Ab | SARS-CoV2 | | SARS-CoV2 | | S; RBD | B-cells; SARS-CoV2 | 248 | QVQLVQSGAEVKKPGASVKVSCKASGY |
| B4 | | | | | | | Human Patient | | TFTSYGISWVRQAPGQGLEWMGWISA |
| | | | | | | | | | YNGNTNYAQKLQGRVTMTTDTSTSTAY |
| | | | | | | | | | MELRSLRSDDTAVYYCARDGELLGWFD |
| | | | | | | | | | PWGQGTLVTVSS |
| CnC2t1p1_ | Ab | SARS-CoV2 | | SARS-CoV2 | | S; RBD | B-cells; SARS-CoV2 | 249 | EVQLVESGGGLVQPGRSLRLSCTASGFT |
| D6 | | | | | | | Human Patient | | FGDYAMSWFRQAPGKGLEWVGFIRSK |
| | | | | | | | | | AYGGTTEYAASVKGRFTISRDDSKSIAYL |
| | | | | | | | | | QMNSLKTEDTAVYYCTRVRRLWFGSYY |
| | | | | | | | | | YGMDVWGQGTTVTVSS |
| CnC2t1p1_ | Ab | SARS-CoV2 | | SARS-CoV2 | | S; RBD | B-cells; SARS-CoV2 | 250 | EVQLVESGGGLVQPGRSLRLSCTASGFT |
| E12 | | | | | | | Human Patient | | FGDYAMSWFRQAPGKGLEWVGFIRSK |
| | | | | | | | | | AYGGTTEYAASVKGRFTISRDDSKSIVYL |
| | | | | | | | | | QMNSLKTEDTAVYYCTRVRRLWFGSYY |
| | | | | | | | | | YGMDVWGQGTTVTVSS |
| CnC2t1p1_ | Ab | SARS-CoV2 | | SARS-CoV2 | | S; RBD | B-cells; SARS-CoV2 | 251 | QVQLVQSGAEVKNPGASVKVSCKASGY |
| E8 | | | | | | | Human Patient | | IFTNYYIHWVRQAPGQGLEWVGWIHSL |
| | | | | | | | | | SGGTSYAQKFQGRVTLTRDASIRTAYME |
| | | | | | | | | | LSRLGSDDTALYYCARASVSTITDFDYWG |
| | | | | | | | | | QGTLVAVSS |
| CnC2t1p1_ | Ab | SARS-CoV2 | | SARS-CoV2 | | S; RBD | B-cells; SARS-CoV2 | 252 | QVQLVQSGAEVKKPGASVKVSCKASGYI |
| G6 | | | | | | | Human Patient | | FTNYYIHWVRQAPGQGLEWVGWIHSL |
| | | | | | | | | | SGGTSYAQKFQGRVTLTRDAPIRTAYME |
| | | | | | | | | | LSGLGSDDTAVYYCARASVATITDFDYW |
| | | | | | | | | | GQGTLVAVSS |
| COV2- | Ab | SARS-CoV1, | | | SARS-CoV2 | S; non- | B-cells; SARS-CoV2 | 253 | QVQLVESGGGVVQPGRSLRLSCAASGF |
| 2006 | | SARS-CoV2 | | | | RBD | Human Patient | | TFSYYAILWFRQAPGKGLEWVAIISYDGS |
| | | | | | | | | | NKYYADSVKGRFTISRDNSKNTLYLQMN |
| | | | | | | | | | SLRPEDTAVYYCARPQSGGYYAPLDYW |
| | | | | | | | | | GQGTLVTVSS |
| COV2- | Ab | SARS-CoV1, | | | SARS-CoV2 | S; RBD | B-cells; SARS-CoV2 | 254 | QVQLVESGGGVVQPGRSLRLSCAASGF |
| 2007 | | SARS-CoV2 | | | | | Human Patient | | TFSRYGMHWVRQAPGKGLEWVGIISYD |
| | | | | | | | | | ASDKTYAESVKGRFTISRDNSKNTLYLQ |
| | | | | | | | | | MNSLRAEDTAVYYCAKVSATYYYYYYG |
| | | | | | | | | | MDVWGQGTTVTVSS |
| COV2- | Ab | SARS-CoV1, | | | SARS-CoV2 | S; non- | B-cells; SARS-CoV2 | 255 | QVQLVESGGGVVQPGRSLRLSCAASGF |
| 2009 | | SARS-CoV2 | | | | RBD | Human Patient | | TFSTYAMHWVRQAPGKGLEWVAVISY |
| | | | | | | | | | DGSNKYYADSVKGRFTISRDNPKNTLYL |
| | | | | | | | | | QMNSLRAEDTAVYYCARDTATYVLLWS |
| | | | | | | | | | GDFNLDYWGQGTLVTVSS |
| COV2- | Ab | SARS-CoV1, | | | SARS-CoV2 | S; non- | B-cells; SARS-CoV2 | 256 | QVQLVESGGGVVQPGRSLRLSCAASGF |
| 2011 | | SARS-CoV2 | | | | RBD | Human Patient | | TFSTYAMHWVRQAPGKGLEWVTLISYD |
| | | | | | | | | | GGNKYYADSVKGRFTISRDNSKNTLYLQ |
| | | | | | | | | | MNSLRAEDAAVYFCARGHTGNYYYGM |
| | | | | | | | | | DVWGQGTTVTVSS |
| COV2- | Ab | SARS-CoV1, | | | SARS-CoV2 | S; non- | B-cells; SARS-CoV2 | 257 | QVHLVESGGGVVQPGRSLRLSCAASGF |
| 2013 | | SARS-CoV2 | | | | RBD | Human Patient | | TFSNYGMHWVRQAPGKGLEWVAVISG |
| | | | | | | | | | DENNKFYANSVKGRFTISRDNSKNTLSL |
| | | | | | | | | | QMNSLRPEDTARYYCAKGGDSSGWAW |
| | | | | | | | | | DGDNPPTDYWGQGTLVIVSS |
| COV2- | Ab | SARS-CoV1, | | SARS-CoV2 | | S; RBD | B-cells; SARS-CoV2 | 258 | EVQLVESGGGLVQPGRSLRLSCAASGFT |
| 2015 | | SARS-CoV2 | | (weak) | | | Human Patient | | FDDYAMHWVRQAPGKGLEWVSGISW |
| | | | | | | | | | NSGSIGYADSVKGRFTISRDNAKNSLYLQ |
| | | | | | | | | | MNSLRTEDTALYYCAMGPFGELLPYYFD |
| | | | | | | | | | YWGQGTLVTVSS |
| COV2- | Ab | SARS-CoV1, | | | SARS-CoV2 | S; RBD | B-cells; SARS-CoV2 | 259 | QVQLVQSGAEVKKPGASVKVSCKVSGY |
| 2016 | | SARS-CoV2 | | | | | Human Patient | | TLTELSIHWVRQAPGKGLEWMGGFDP |
| | | | | | | | | | EDAETIYAQNFQGRVTMTEDTSTDTAY |
| | | | | | | | | | MELSSLRSEDTALYYCAAAPAVMTAGW |
| | | | | | | | | | FDPWGQGTLVSVSS |
| COV2- | Ab | SARS-CoV1, | | | SARS-CoV2 | S; non- | B-cells; SARS-CoV2 | 260 | QVQLEESGPGLVKPSETLSLTCTVSGGSI |
| 2017 | | SARS-CoV2 | | | | RBD | Human Patient | | SSHYWSWIRQPPGKGLEWIGYIQDSGS |
| | | | | | | | | | TNYNPSLKSRVTISVDTSKNQFSLRLSSV |
| | | | | | | | | | TTADTAVYYCVRGAMAWFDPWGQGTL |
| | | | | | | | | | VTVSS |
| COV2- | Ab | SARS-CoV2 | SARS-CoV1 | | SARS-CoV1, | S; NTD | B-cells; SARS-CoV2 | 261 | QVQLVQSGAEVKKPGASVKVSCKVSGY |
| 2021 | | | | | SARS-CoV2 | | Human Patient | | TLIELSIHWVRQAPGKGLEWMGGFDPE |
| | | | | | | | | | DVETIYAQKFQGRVTMTEDTSTDTAYM |
| | | | | | | | | | ELSSLTSEDRAVYYCATQPAAIGGTPPYY |
| | | | | | | | | | WGQGTLVTVSS |
| COV2- | Ab | SARS-CoV2 | SARS-CoV1 | | SARS-CoV1, | S; non- | B-cells; SARS-CoV2 | 262 | QVQLVQSGAEVKKPGASVKVSCKASGY |
| 2022 | | | | | SARS-CoV2 | RBD | Human Patient | | TFTSYVISWVRQAPGQGLEWMGWISA |
| | | | | | | | | | YNGNTNYAQKLQGRVTMTTDTSTSTAY |
| | | | | | | | | | MELRSLRSDDTAVYYCARDQGPTYYYGS |
| | | | | | | | | | GSPHYGMDVWGQGTTVTVSS |
| COV2- | Ab | SARS-CoV1, | | | SARS-CoV2 | S; non- | B-cells; SARS-CoV2 | 263 | QVHLVESGGGVVQPGRSLRLSCAASGF |
| 2025 | | SARS-CoV2 | | | | RBD | Human Patient | | TFSNYGMHWVRQAPGKGLEWVAVISG |
| | | | | | | | | | DENNKFYANSVKGRFTISRDNSKNTLSL |
| | | | | | | | | | QMNSLRPEDTARYYCAKGGDSSGWAW |
| | | | | | | | | | DGDNPPTDYWGQGTLVIVSS |
| COV2- | Ab | SARS-CoV2 | SARS-CoV1 | | SARS-CoV1, | S; NTD | B-cells; SARS-CoV2 | 264 | QVQLVQSGAEVKKPGASVKVSCKVSGY |
| 2026 | | | | | SARS-CoV2 | | Human Patient | | TLTELSIHWVRQAPGKGLEWMGGFDP |
| | | | | | | | | | EDGETVYAQKFQGRVTMTEDTSSDTAY |
| | | | | | | | | | MELSSLRSEDTAVYYCATSFPIRGDPSYY |
| | | | | | | | | | YYYYGMDVWGQGTTVTVSS |
| COV2- | Ab | SARS-CoV2 | SARS-CoV1 | | SARS-CoV1, | S; non- | B-cells; SARS-CoV2 | 265 | QVQLVESGGGVVQPGRSLRLSCAASGFI |
| 2027 | | | | | SARS-CoV2 | RBD | Human Patient | | FSTYGMHWVRQAPGKGLEWVAVISYD |
| | | | | | | | | | GSNKYNADSVKGRFTISRDNSKNTLYLQ |
| | | | | | | | | | MNSLRVEDTAVYYCAIYGYYYYGLDVW |
| | | | | | | | | | GQGTTVTVSS |
| COV2- | Ab | SARS-CoV1, | | | SARS-CoV2 | S; non- | B-cells; SARS-CoV2 | 266 | QVHLVESGGGVVQPGRSLRLSCAASGF |
| 2028 | | SARS-CoV2 | | | | RBD | Human Patient | | SFRNYGMHWVRQAPGKGLEWVAVISG |
| | | | | | | | | | DENNKFYANSVKGRFTISRDNSKNTLSL |
| | | | | | | | | | QMNSLRPEDTARYYCAKGGDSSGWAW |
| | | | | | | | | | DGDNPPTDYWGQGTLVIVSS |
| COV2- | Ab | SARS-CoV1, | | | SARS-CoV2 | S; non- | B-cells; SARS-CoV2 | 267 | QVQLQESGPGLVKPSGTLSLTCVVSGGS |
| 2029 | | SARS-CoV2 | | | | RBD | Human Patient | | ISSSNWGWVRQPPGKGLEWIGEIYLSG |
| | | | | | | | | | TTNYNPSLTSRVTISVDKSKNQFSLKLNS |
| | | | | | | | | | VTAADTAIYYCARPTAGAGGAFDIWGQ |
| | | | | | | | | | GTVVTVSS |
| COV2- | Ab | SARS-CoV1, | | | SARS-CoV2 | S; RBD | B-cells; SARS-CoV2 | 268 | QVTLKESGPVLVKPTETLTLTCTVSGFSL |
| 2031 | | SARS-CoV2 | | | | | Human Patient | | SNARMGVSWIRQPPGKALEWLAHIFWN |
| | | | | | | | | | DENSYSTSLKTRLTISKDTSKSQVVLNMT |
| | | | | | | | | | NMDPVDTATYYCARTEWLLSDNWFDS |
| | | | | | | | | | WGQGTLVTVSS |
| COV2- | Ab | SARS-CoV1, | | | SARS-CoV2 | S; RBD | B-cells; SARS-CoV2 | 269 | QVQLVQSGAEVKKPGASVKVSCKASGD |
| 2032 | | SARS-CoV2 | | | | | Human Patient | | TFSSYYLHWVRQAPGQGLQWMGISNP |
| | | | | | | | | | SGGSTTYAQKFQGRVTMTGDTSTSTVY |
| | | | | | | | | | MELSSLRSEDTAVYYCARGGLVPAARNA |
| | | | | | | | | | FDIWGQGTMVTVSS |
| COV2- | Ab | SARS-CoV1, | | | SARS-CoV2 | S; non- | B-cells; SARS-CoV2 | 270 | QVQLQESGPGLVKPSGTLSLTCVVSGGS |
| 2033 | | SARS-CoV2 | | | | RBD | Human Patient | | ISSSNWGWVRQPPGKGLEWIGEIYHSG |
| | | | | | | | | | TTNYNPSLRSRVTISVDKSKNQLSLKLNS |
| | | | | | | | | | VTAADTAIYYCARPTAGAGGAFDTWGQ |
| | | | | | | | | | GTMVTVSA |
| COV2- | Ab | SARS-CoV1, | | | SARS-CoV2 | S; non- | B-cells; SARS-CoV2 | 271 | QVQLVQSGAEVKKPGASVKVSCKASGY |
| 2034 | | SARS-CoV2 | | | | RBD | Human Patient | | TFTTYGISWVRQAPGQGLEWMGWISA |
| | | | | | | | | | YNGNSNYGKKFQGRVTMTADTSTSTAY |
| | | | | | | | | | MELRSLRSDDTAVYYCARDLPIKVVVPA |
| | | | | | | | | | ADYNWFDPWGQGTLVTVSS |
| COV2- | Ab | SARS-CoV2 | SARS-CoV1 | | SARS-CoV1, | S; non- | B-cells; SARS-CoV2 | 272 | QITLKESGPTLVKPTQTLTLTCTFSGFSL |
| 2035 | | | | | SARS-CoV2 | RBD | Human Patient | | NTNGVAVGWIRQPPGKALEWLALIYWD |
| | | | | | | | | | DDKRYSPSLKSRLTITKDTSKNQVVLTMT |
| | | | | | | | | | NMDPVDTATYYCAHRRGILTEDAFDIW |
| | | | | | | | | | GQGTMVTVSS |
| COV2- | Ab | SARS-CoV2 | SARS-CoV1 | SARS-CoV2 | | S; RBD | B-cells; SARS-CoV2 | 273 | EVQLVESGGGLVQPGESLRLSCAASGIT |
| 2037 | | | | | | | Human Patient | | VSSNYMSWVRQAPGKGLEWVSVIYSG |
| | | | | | | | | | GSTFYADSVKGRFIISRHNSKNTLYLQM |
| | | | | | | | | | NSLRAEDTAVYYCARDLNEHGLDVWG |
| | | | | | | | | | QGTTVSVSS |
| COV2- | Ab | SARS-CoV2 | SARS-CoV1 | | SARS-CoV1, | S; RBD | B-cells; SARS-CoV2 | 274 | QVQLVQSGAEVKKPGASVKVSCKASGY |
| 2039 | | | | | SARS-CoV2 | | Human Patient | | TFTSYYMHWVRQAPGQGLEWMGIINP |
| | | | | | | | | | SAGSTSYAQKFQGRVTMTRDTSTSTVY |
| | | | | | | | | | MELSSLRSEDTAVYYCARGTLIPAHRGAF |
| | | | | | | | | | DIWGQGTMVTVSS |
| COV2- | Ab | SARS-CoV1, | | | SARS-CoV2 | S; non- | B-cells; SARS-CoV2 | 275 | QVQLQESGPGLVKPSQTLSLTCTVSGGSI |
| 2041 | | SARS-CoV2 | | | | RBD | Human Patient | | SSGTYYWSWIRQPAGKGLEWIGRFYTS |
| | | | | | | | | | GSTNYNPSLKSRVTISVDASKNQFSLKLS |
| | | | | | | | | | SVTAADTAVYYCARARPDYYYYYAMDV |
| | | | | | | | | | WGQGTTVTVSS |
| COV2- | Ab | SARS-CoV2 | SARS-CoV1 | SARS-CoV2 | | S; RBD | B-cells; SARS-CoV2 | 276 | EVQLVESGGGLVQPGRSLRLSCAASGFT |
| 2046 | | | | | | | Human Patient | | FDDYAMHWVRQAPGKGLEWVSGISW |
| | | | | | | | | | NSGSIAYTDSVKGRFTISRDNAKNSLYLQ |
| | | | | | | | | | MNSLRAEDTALYYCAKAHSTGHQYYYG |
| | | | | | | | | | MDVWGQGTTVTVSS |
| COV2- | Ab | SARS-CoV2 | SARS-CoV1 | SARS-CoV2 | | S; RBD | B-cells; SARS-CoV2 | 277 | QVQLVQSGAEVKKPGASVKVSCKASGY |
| 2050 | | | | | | | Human Patient | | TFTDYYMHWVRQAPGQGLEWMGWI |
| | | | | | | | | | NPNSRGTNYAQKFQGRVTMTRDTSIST |
| | | | | | | | | | VYMELSRLTSDDTAVYYCARVVVLGYGR |
| | | | | | | | | | PNNYYDGRNVWDYWGQGTLVTVSS |
| COV2- | Ab | SARS-CoV2 | SARS-CoV1 | | SARS-CoV1, | S; RBD | B-cells; SARS-CoV2 | 278 | QVTLRESGPALVKPTQTLSLTCTFSGFSL |
| 2051 | | | | | SARS-CoV2 | | Human Patient | | GTSGMCVSWIRQPPGKALEWLARIDW |
| | | | | | | | | | DDDKYYSTSLKTRLTISKDTSKNQVVLTM |
| | | | | | | | | | TNMDPVDTATYYCARGVVTYDYWGQG |
| | | | | | | | | | TLVTVSS |
| COV2- | Ab | SARS-CoV2 | SARS-CoV1 | | SARS-CoV1, | S; non- | B-cells; SARS-CoV2 | 279 | QVQLVQSGAEVKKPGSSVKVSCKASGD |
| 2054 | | | | | SARS-CoV2 | RBD | Human Patient | | TFSSYTINWVRQAPGQGLEWMGRIIPIL |
| | | | | | | | | | GIPNYAQKFQGRVTITADKSTSTAFMEL |
| | | | | | | | | | SSLRSEDTAVYYCARGRGYSNYGASYYM |
| | | | | | | | | | DVWGKGTTVTVSS |
| COV2- | Ab | SARS-CoV1, | | | SARS-CoV2 | S; RBD | B-cells; SARS-CoV2 | 280 | EVQLVESGGGLVQPGRSLRLSCAASGFT |
| 2055 | | SARS-CoV2 | | | | | Human Patient | | FDDYAMNWVRQPPGKGLEWVSGISW |
| | | | | | | | | | NSDSIGYADSVKGRFTISRDNAKNSLYLQ |
| | | | | | | | | | MNSLRAEDTAMYYCAKGRGAGYTSYM |
| | | | | | | | | | DVWGKGTTVTVSS |
| COV2- | Ab | SARS-CoV2 | SARS-CoV1 | SARS-CoV2 | | S; RBD | B-cells; SARS-CoV2 | 281 | QVQLAQSGAEVKKPGASVKVSCKAAGY |
| 2064 | | | | | | | Human Patient | | TFTSYDINWVRQATGQGLEWMGWMN |
| | | | | | | | | | SNSGNAGYAQKFQGRVTMTRDTSTSTA |
| | | | | | | | | | YMELSSLTSDDTAVYYCARMRTGWPTH |
| | | | | | | | | | GRPDDFWGRGTLVTVSS |
| COV2- | Ab | SARS-CoV2 | SARS-CoV1 | SARS-CoV2 | | S; RBD | B-cells; SARS-CoV2 | 282 | EVQLVESGGGLVQPGGSLRLSCAASGFT |
| 2068 | | | | | | | Human Patient | | VSSNYMSWVRQAPGKGLEWVSVIYPG |
| | | | | | | | | | GSAFYADSVKGRFTISRHNSNNTLCLQM |
| | | | | | | | | | NSLRTEDTAVYYCARSYDILTGYRDAFDI |
| | | | | | | | | | WGQGTMVTVSS |
| COV2- | Ab | SARS-CoV2 | SARS-CoV1 | | SARS-CoV1, | S; RBD | B-cells; SARS-CoV2 | 283 | QVQLQQWGAGLLKPSETLSLTCAVSGG |
| 2070 | | | | | SARS-CoV2 | | Human Patient | | SFSAYYWSWIRQPPGKGLEWIGEINHS |
| | | | | | | | | | GSTNYNPSLRSRVTISVDTSKNQFSLKLS |
| | | | | | | | | | SVTAADTAVYYCARVGYSQGYYYYYMDV |
| | | | | | | | | | WGKGTTVTVSS |
| COV2- | Ab | SARS-CoV2 | SARS-CoV1 | SARS-CoV2 | | S; RBD | B-cells; SARS-CoV2 | 284 | QMQLVQSGPEVKKPGTSVKVSCKTSGF |
| 2072 | | | | | | | Human Patient | | TFTSSAIQWVRQARGQRLEWIGWIVVG |
| | | | | | | | | | SGNTNYAQKFQERVTITRDMSTSTAYM |
| | | | | | | | | | ELSSLRSEDTAVYYCAAPHCNRTSCYDAF |
| | | | | | | | | | DLWGQGTMVTVSS |
| COV2- | Ab | SARS-CoV2 | SARS-CoV1 | | SARS-CoV1, | S; RBD | B-cells; SARS-CoV2 | 285 | QVQLVQSGAEVKKPGSSVKVSCKASGG |
| 2078 | | | | | SARS-CoV2 | | Human Patient | | TFSSYSITWVRQAPGQGLEWMGRIIPVL |
| | | | | | | | | | GIANYAQKFQDRVTITADKSTSTAYMEL |
| | | | | | | | | | SSLRSEDTAVYYCARVGVSGFKSGSNWY |
| | | | | | | | | | FDLWGRGTLVTVSS |
| COV2- | Ab | SARS-CoV2 | SARS-CoV1 | | SARS-CoV1, | S; RBD | B-cells; SARS-CoV2 | 286 | EVQLVESGGGLVQPGGSLRLSCAASGLT |
| 2080 | | | | | SARS-CoV2 | | Human Patient | | VRSNYMTWVRQTPGKGLEWVSVIYSG |
| | | | | | | | | | GSTFYADSVKGRFTISRDNSKNTVYLQM |
| | | | | | | | | | NSLRAEDTAVYYCARDLVTYGLDVWGQ |
| | | | | | | | | | GTTVTVSS |
| COV2- | Ab | SARS-CoV1, | | | SARS-CoV2 | S; RBD | B-cells; SARS-CoV2 | 287 | EVQLVESGGGVVRPGGSLRLSCAASGFI |
| 2082 | | SARS-CoV2 | | | | | Human Patient | | FDDYDMTWVRQAPGKGLEWVSGISW |
| | | | | | | | | | NGGNTGYADSVKGRFTISRDNAKNSLYL |
| | | | | | | | | | QMNSLRAEDTALYHCAVIMSPIPRYSGY |
| | | | | | | | | | DWAGGAFDIWGQGTMVTVSS |
| COV2- | Ab | SARS-CoV1, | | | SARS-CoV2 | S; RBD | B-cells; SARS-CoV2 | 288 | QVQLVESGGGVVQPGRSLRLSCAASGF |
| 2083 | | SARS-CoV2 | | | | | Human Patient | | TFSNYGMHWVRQAPGKGLEWVAVMS |
| | | | | | | | | | YDGSNKYYADSVKGRFTISRDNSKNTLYL |
| | | | | | | | | | QMNSLRAEDTAVYYCAKNLGPYCSGGT |
| | | | | | | | | | CYSLVGDYWGQGTLVTVSS |
| COV2- | Ab | SARS-CoV1, | | | SARS-CoV2 | S; RBD | B-cells; SARS-CoV2 | 289 | EVQLVESGGGVVRPGGSLRLSCAASGFI |
| 2094 | | SARS-CoV2 | | | | | Human Patient | | FDDYDMTWVRQAPGKGLEWVSGISW |
| | | | | | | | | | NGGSTGYADSVKGRFTISRDNAKNSLYL |
| | | | | | | | | | QMSSLRAEDTALYHCAVIMSPIPRYSGY |
| | | | | | | | | | DWAGDAFDIWGQGTMVTVSS |
| COV2- | Ab | SARS-CoV2 | SARS-CoV1 | SARS-CoV2 | | S; RBD | B-cells; SARS-CoV2 | 290 | QVQLVQSGAEVKKPGASVKVSCKASGY |
| 2096 | | | | | | | Human Patient | | TFGSFDISWVRQATGQGLEWMGRMS |
| | | | | | | | | | SSSGSTAYAQKFQGRVTMTRDTSTSTA |
| | | | | | | | | | YMELSSLRSEDTAMYYCARMRSGWPTH |
| | | | | | | | | | GRPDDFWGRGTLVTVSS |
| COV2- | Ab | SARS-CoV2 | SARS-CoV1 | SARS-CoV2 | | S; RBD | B-cells; SARS-CoV2 | 291 | EVQLVESGGGLVQPGRSLRLSCAASGFT |
| 2097 | | | | | | | Human Patient | | FDDYAMHWVRQAPGKGLEWVSGISW |
| | | | | | | | | | SSGTIGYADSVKGRFIISRDSAKSSLYLQ |
| | | | | | | | | | MSSLRPEDTALYYCAKDIIRQGEDGMD |
| | | | | | | | | | VWGQGTTVTVSS |
| COV2- | Ab | SARS-CoV2 | SARS-CoV1 | SARS-CoV2 | | S; RBD | B-cells; SARS-CoV2 | 292 | EVQLLESGGGLIQPGGSLRLSCAASGFTF |
| 2098 | | | | | | | Human Patient | | SSYAMSWVRQAPGKGLEWVSGIISTSG |
| | | | | | | | | | GATYSADSVRGRFTTSRDSSKSILYLQM |
| | | | | | | | | | SSLRGEDTAVYYCVKGLFDWFPLWGQ |
| | | | | | | | | | GTMVTVSS |
| COV2- | Ab | SARS-CoV1, | | SARS-CoV2 | | S; RBD | B-cells; SARS-CoV2 | 293 | EVQLVESGGGLVQPGGSLRLSCAASGFT |
| 2103 | | SARS-CoV2 | | | | | Human Patient | | FSRHWMTWVRQAPGKGLEWVASIKQ |
| | | | | | | | | | DGSEKYYVDSVKGRLTISRDSAKSSLYL |
| | | | | | | | | | QMSSLRAEDTAVYYCARLGFYYGGADY |
| | | | | | | | | | WGQGTLVTVSS |
| COV2- | Ab | SARS-CoV2 | SARS-CoV1 | | SARS-CoV1, | S; RBD | B-cells; SARS-CoV2 | 294 | SVQLVESGGGLVQPGGSLRLSCAASGF |
| 2108 | | | | | SARS-CoV2 | | Human Patient | | TFHHYAMHWVRQAPGKGLEWVSGISG |
| | | | | | | | | | SSDYRAYADSLKGRFTISRDYAKSSLWL |
| | | | | | | | | | QMSSLTSEDTAFYYCAKGVDYGGKLAYF |
| | | | | | | | | | DSWGQGTLVTVSS |
| COV2- | Ab | SARS-CoV2 | SARS-CoV1 | | SARS-CoV1, | S; RBD | B-cells; SARS-CoV2 | 295 | QVQLVESGGGVVQPGRSLRLSCAASGF |
| 2110 | | | | | SARS-CoV2 | | Human Patient | | SFSSYVMSWVRQAPGKGqLEWVAVISY |
| | | | | | | | | | DGSSKYYADSVKGRFTISRDSSKSTLYLQ |
| | | | | | | | | | MSSLRAEDTAVYYCARDIDSGYDPTPVF |
| | | | | | | | | | DYWGQGTLVTVSS |
| COV2- | Ab | SARS-CoV1, | | | SARS-CoV2 | S; RBD | B-cells; SARS-CoV2 | 296 | EVQLVESGGGLVQPGGSLRLSCAASGFT |
| 2111 | | SARS-CoV2 | | | | | Human Patient | | FSSYDLHWVRQGTGKRLEWVSAIGTAG |
| | | | | | | | | | DTYYLGSVKGRFTISRESAKSSLYLQMS |
| | | | | | | | | | SLRAGDTAVYYCARVLYDSSGFYSWFDP |
| | | | | | | | | | WGQGTLVTVSS |
| COV2- | Ab | SARS-CoV2 | SARS-CoV1 | SARS-CoV2 | | S; RBD | B-cells; SARS-CoV2 | 297 | EVQLVESGGGLIQPGGSLRLSCAASEVT |
| 2113 | | | | | | | Human Patient | | VSSSYMSWVRQAPGKGLEWVSLIYSGG |
| | | | | | | | | | TTYYADSVKGRFTISRDSSKSTLYLQMS |
| | | | | | | | | | SLRAEDTAVYYCARDFLRWHDLWGQG |
| | | | | | | | | | TLVTVSS |
| COV2- | Ab | SARS-CoV2 | SARS-CoV1 | | SARS-CoV1, | S; RBD | B-cells; SARS-CoV2 | 298 | QVQLVQSGAEVKKPGSSVKVSCKASGD |
| 2114 | | | | | SARS-CoV2 | | Human Patient | | TFSSYTINWVRQAPGQGLEWMGRIIPIL |
| | | | | | | | | | GIPNYAQKFQGRVTITADKSTSTAFMEL |
| | | | | | | | | | SSLRSEDTAVYYCARGRGYSNYGASYYM |
| | | | | | | | | | DVWGKGTTVTVSS |
| COV2- | Ab | SARS-CoV1, | | | SARS-CoV2 | S; RBD | B-cells; SARS-CoV2 | 299 | QLQLQESGPGLVKPSETLSLTCTVSGGSI |
| 2128 | | SARS-CoV2 | | | | | Human Patient | | SSSSYYWGWIRQPPGNGLEWIGSIYYSG |
| | | | | | | | | | STYYNPSLKGRVSISVDTSKNQFSLKLSS |
| | | | | | | | | | VTAADTAVYYCARILVIFTLNWFDPWGQ |
| | | | | | | | | | GTLVTVSS |
| COV2- | Ab | SARS-CoV2 | SARS-CoV1 | SARS-CoV2 | | S; RBD | B-cells; SARS-CoV2 | 300 | EVQLVESGGGLVKPGGSLRLSCAASGFT |
| 2130 | | | | | | | Human Patient | | FRDVWMSWVRQAPGKGLEWVGRIKS |
| | | | | | | | | | KIDGGTTDYAAPVKGRFTISRDDSKNTLY |
| | | | | | | | | | LQMNSLKTEDTAVYYCTTAGSYYYDTVG |
| | | | | | | | | | PGLPEGKFDYWGQGTLVTVSS |
| COV2- | Ab | SARS-CoV2 | SARS-CoV1 | SARS-CoV2 | | S; RBD | B-cells; SARS-CoV2 | 301 | EVQLVESGGGLIQPGGSLRLSCAASEVT |
| 2132 | | | | | | | Human Patient | | VSSNYMSWVRQAPGKGLEWVSLIYSGG |
| | | | | | | | | | TTYYADSVKGRFTISRDNSKNTLYLQMN |
| | | | | | | | | | SLRAEDTAVYYCARDFLRWHDLWGQG |
| | | | | | | | | | TLVTVSS |
| COV2- | Ab | SARS-CoV2 | SARS-CoV1 | | SARS-CoV1, | S; RBD | B-cells; SARS-CoV2 | 302 | QVQLQESGPGLVKPSETLSLTCTVSGGS |
| 2137 | | | | | SARS-CoV2 | | Human Patient | | VSSGSYYWSWIRQPPGKGLECIGYIYYSG |
| | | | | | | | | | SSNYNPSLKSRVTISVDTSKNQFSLKMSS |
| | | | | | | | | | VTAADTAVYYCAGSPVPPTIVGASYWG |
| | | | | | | | | | QGTLVTVSS |
| COV2- | Ab | SARS-CoV2 | SARS-CoV1 | | SARS-CoV1, | S; non- | B-cells; SARS-CoV2 | 303 | EVQLVQSGAEVKKPGESLKISCKGSGYSF |
| 2142 | | | | | SARS-CoV2 | RBD | Human Patient | | TSYWIDWVRQMPGKGLEWMGIIYPGD |
| | | | | | | | | | SDTRYSPSFQGQVTISADKSTSTAYLQW |
| | | | | | | | | | SSLKASDTAMYYCARRGEAAGIWYFDL |
| | | | | | | | | | WGRGTLVTVSS |
| COV2- | Ab | SARS-CoV2 | SARS-CoV1 | | SARS-CoV1, | S; non- | B-cells; SARS-CoV2 | 304 | EVQLVESGGGLVQPGGSLRLSCAASGFT |
| 2143 | | | | | SARS-CoV2 | RBD | Human Patient | | VSSNYMSWVRQAPGKGLEWVSVIYSA |
| | | | | | | | | | GSTYYADSVKGRFSISRDKSKNTLYLQM |
| | | | | | | | | | NSLRAEDTAVYYCAKEGGSGSLRYYYYG |
| | | | | | | | | | MDVWGQGTTVTVSS |
| COV2- | Ab | SARS-CoV2 | SARS-CoV1 | | SARS-CoV1, | S; NTD | B-cells; SARS-CoV2 | 305 | EVQLVESGGGLVQPGGSLRLSCEASGFT |
| 2146 | | | | | SARS-CoV2 | | Human Patient | | FSSSEINWVRQAPGKGLEWVSHISSSGSI |
| | | | | | | | | | IYYADSVKGRFTISRDNAKNSLYLQMNSL |
| | | | | | | | | | RAEDTAVYYCARRSYRSSWYYYYGMDV |
| | | | | | | | | | WGQGTTVTVSS |
| COV2- | Ab | SARS-CoV2 | SARS-CoV1 | | SARS-CoV1, | S; non- | B-cells; SARS-CoV2 | 306 | QVQLAESGGGVVQPGRSLRLSCAASGF |
| 2147 | | | | | SARS-CoV2 | RBD | Human Patient | | TFSSYAMHWVRQAPGKGLEWVAVISY |
| | | | | | | | | | DGSNKYYADSVKGRFTISRDNSKNTLYL |
| | | | | | | | | | QMNSLRAEDTAVYYCARSTSGSYYYGM |
| | | | | | | | | | DVWGQGTTVTVSS |
| COV2- | Ab | SARS-CoV2 | SARS-CoV1 | | SARS-CoV1, | S; NTD | B-cells; SARS-CoV2 | 307 | QVQLVESGGGVVQPGRSLRLSCAASGF |
| 2150 | | | | | SARS-CoV2 | | Human Patient | | TFSTYAMHWVRQAPGKGLEWVAVISY |
| | | | | | | | | | DGSNKYYADSVKGRFTISRDNSKNTLYL |
| | | | | | | | | | QMIGLRAEDTAVYYCARDWAPTYYDM |
| | | | | | | | | | PSAFDIWGQGTMVTVSS |
| COV2- | Ab | SARS-CoV1, | | | SARS-CoV2 | S; non- | B-cells; SARS-CoV2 | 308 | QVQLVQSGAEVRKPGSSVKVSCKASGG |
| 2151 | | SARS-CoV2 | | | | RBD | Human Patient | | TFSSYAISWVRQAPGQGLEWMGGIIPV |
| | | | | | | | | | FGTANYAQKFQGRVTITADKSTSTAFME |
| | | | | | | | | | LNSLRSEDTAVYYCARIGSYPEYFQHWG |
| | | | | | | | | | QGTLVTVSS |
| COV2- | Ab | SARS-CoV1, | | | SARS-CoV2 | S; RBD | B-cells; SARS-CoV2 | 309 | QVQLQESGPGLVKPSQTLSLTCTVSGGSI |
| 2158 | | SARS-CoV2 | | | | | Human Patient | | SSGGYFWSWIRQHPGKGLEWIGSIYYS |
| | | | | | | | | | GSTYYNPSLRSRITISVDTSKNQFSLKLS |
| | | | | | | | | | SVTAADTAVYYCARGGSGSYSLFDYWGQ |
| | | | | | | | | | GTLVTVSS |
| COV2- | Ab | SARS-CoV1, | | | SARS-CoV2 | S; non- | B-cells; SARS-CoV2 | 310 | QVQLAESGGGVVQPGRSLRLSCAASGF |
| 2159 | | SARS-CoV2 | | | | RBD | Human Patient | | TFSSYAMHWVRQAPGKGLEWVAVISY |
| | | | | | | | | | DGSNKYYADSVKGRFTISRDNSKNTLYL |
| | | | | | | | | | QMNSLRAEDTAVYYCARSTSGSYYYGM |
| | | | | | | | | | DVWGQGTTVTVSS |
| COV2- | Ab | SARS-CoV1, | | | SARS-CoV2 | S; non- | B-cells; SARS-CoV2 | 311 | QVQLAESGGGVVQPGRSLRLSCAASGF |
| 2160 | | SARS-CoV2 | | | | RBD | Human Patient | | TFSSYAMHWVRQAPGKGLEWVAVISY |
| | | | | | | | | | DGSNKYYADSVKGRFTISRDNSKNTLYL |
| | | | | | | | | | QMNSLRAEDTAVYYCARSTSGSYYYGM |
| | | | | | | | | | DVWGQGTTVTVSS |
| COV2- | Ab | SARS-CoV2 | SARS-CoV1 | SARS-CoV2 | | S; RBD | B-cells; SARS-CoV2 | 312 | EVQLVESGGGLVQPGGSLRLSCAASGLT |
| 2165 | | | | | | | Human Patient | | VRSNYMTWVRQTPGKGLEWVSVIYSG |
| | | | | | | | | | GSTFYADSVKGRFTISRDNSKNTVYLQM |
| | | | | | | | | | NSLRAEDTAVYYCARDLVTYGLDVWGQ |
| | | | | | | | | | GTTVTVSS |
| COV2- | Ab | SARS-CoV1, | | | SARS-CoV2 | S; non- | B-cells; SARS-CoV2 | 313 | QVQLVQSGAEVKKPGSSVKVSCKASGG |
| 2166 | | SARS-CoV2 | | | | RBD | Human Patient | | TFSSYAHWVRQAPGQGLEWMGGIIPIF |
| | | | | | | | | | GTTNYAQKFQGRVTITADESTSTAYVELS |
| | | | | | | | | | SLRSEDTAVYYCARIGHFDSSGYYLDYW |
| | | | | | | | | | GQGTLVTVSS |
| COV2- | Ab | SARS-CoV1, | | | SARS-CoV2 | S; non- | B-cells; SARS-CoV2 | 314 | EVQLVESGGGLVQPGGSLRLSCVASGFT |
| 2171 | | SARS-CoV2 | | | | RBD | Human Patient | | FSFYWMSWVRQAPGKGLEWVANIKQ |
| | | | | | | | | | DGGEKYYVDSVKGRFTISRDNAKNSLYL |
| | | | | | | | | | QMNSLRAEDTAVYYCARLSGSSWDFDY |
| | | | | | | | | | WGQGTLVTVSS |
| COV2- | Ab | SARS-CoV2 | SARS-CoV1 | | SARS-CoV1, | S; non- | B-cells; SARS-CoV2 | 315 | EVQLVESGGGVVRPGGSLRLSCAASGFT |
| 2173 | | | | | SARS-CoV2 | RBD | Human Patient | | FDDYGMSWVRQAPGKGLEWVSAINW |
| | | | | | | | | | NGGSTGYADSVKGRFTISRDNAKNSLYL |
| | | | | | | | | | QMNSLRAEDTALYHCARRRSSSRYSSG |
| | | | | | | | | | WYMYYYYMDVWGKGTTVTVSS |
| COV2- | Ab | SARS-CoV1, | | | SARS-CoV2 | S; non- | B-cells; SARS-CoV2 | 316 | EVQLVESGGGLVQPGGSLRLSCVASGFT |
| 2175 | | SARS-CoV2 | | | | RBD | Human Patient | | FSFYWMSWVRQAPGKGLEWVANIKQ |
| | | | | | | | | | DGGEKYYVDSVKGRFTISRDNAKNSLYL |
| | | | | | | | | | QMNSLRAEDTAVYYCARLSGSSWDFDY |
| | | | | | | | | | WGQGTLVTVSS |
| COV2- | Ab | SARS-CoV2 | SARS-CoV1 | | SARS-CoV1, | S; non- | B-cells; SARS-CoV2 | 317 | QITFKESGPTLVKPTETLTLTCTFSGFSV |
| 2177 | | | | | SARS-CoV2 | RBD | Human Patient | | STSGEGVGWIRQPPGKALEWLAVIYWD |
| | | | | | | | | | DDKRYSPSLKSRLTITRDTSKNQVVLTMT |
| | | | | | | | | | NMDPVDTATYYCAHRLWFRDAFDIWG |
| | | | | | | | | | QGTTVTVSS |
| COV2- | Ab | SARS-CoV1, | | | SARS-CoV2 | S; non- | B-cells; SARS-CoV2 | 318 | EVQLVESGGGLVQPGGSLRLSCAASGFT |
| 2178 | | SARS-CoV2 | | | | RBD | Human Patient | | FSTYWMTWVRQAPGKGLEWVANIKQ |
| | | | | | | | | | DGSEKYYVDSVKYRFTISRDNAKNSLYLQ |
| | | | | | | | | | MNSLRAEDTAVYYCARVGSSSWYFDYW |
| | | | | | | | | | GQGTLVTVSS |
| COV2- | Ab | SARS-CoV1, | | | SARS-CoV2 | S; non- | B-cells; SARS-CoV2 | 319 | QVQLVESGGGVVQPGRSLRLSCAASGF |
| 2183 | | SARS-CoV2 | | | | RBD | Human Patient | | TFSSYAMHWVRQAPGKGLEWVAGISY |
| | | | | | | | | | DGSNKYYADSVKGRFTISRDNSKNTLYL |
| | | | | | | | | | QMNSLRAEDTAVYYCARADTMVRGTYF |
| | | | | | | | | | EYWGQGTLVTVSS |
| COV2- | Ab | SARS-CoV1, | | | SARS-CoV2 | S; non- | B-cells; SARS-CoV2 | 320 | QVQLVESGGGVVQPGRSLRLSCAASGF |
| 2187 | | SARS-CoV2 | | | | RBD | Human Patient | | TFSYYPMHWLWVRQAPGKGLEWVAVT |
| | | | | | | | | | SYDGTNKYYADSVKGRFTISRDNSKNTLY |
| | | | | | | | | | LQMNSLRAEDTAVYYCARGGATNFDY |
| | | | | | | | | | WGQGTLVTVSS |
| COV2- | Ab | SARS-CoV1, | | | SARS-CoV2 | S; non- | B-cells; SARS-CoV2 | 321 | EAQLVESGGGLVQPGRSLRLSCAASGFT |
| 2189 | | SARS-CoV2 | | | | RBD | Human Patient | | FDDSAMHWVRQAPGKGLEWVSGISW |
| | | | | | | | | | NSGNVGYADSVKGRFTISRDNAKNSLYL |
| | | | | | | | | | QMNSLRAEDTALYYCTKASRYCSSTICY |
| | | | | | | | | | WNWFDPWGQGTLVTVSS |
| COV2- | Ab | SARS-CoV2 | SARS-CoV1 | | SARS-CoV1, | S; NTD | B-cells; SARS-CoV2 | 322 | EVQLVESGGGLVQPGGSLRLSCAASGFT |
| 2190 | | | | | SARS-CoV2 | | Human Patient | | FSSYEMNWVRQAPGKGLEWVSYISSSG |
| | | | | | | | | | SAIYYADSVKGRFTISRDNAKNSLYLQM |
| | | | | | | | | | NSLRVEDTAVYYCAREARSRYFDWLPSY |
| | | | | | | | | | YFDYWGQGTLVTVSS |
| COV2- | Ab | SARS-CoV2 | SARS-CoV1 | | SARS-CoV1, | S; non- | B-cells; SARS-CoV2 | 323 | EVQLVESGGGVVRPGGSLRLSCAASGFT |
| 2191 | | | | | SARS-CoV2 | RBD | Human Patient | | FDDYGMSWVRQAPGKGLEWVSAINW |
| | | | | | | | | | NGGSTGYADSVKGRFTISRDNAKNSLYL |
| | | | | | | | | | QMNSLRAEDTALYHCARRRSSSRYSSG |
| | | | | | | | | | WYMYYYYMDVWGKGTTVTVSS |
| COV2- | Ab | SARS-CoV2 | SARS-CoV1 | | SARS-CoV1, | S; non- | B-cells; SARS-CoV2 | 324 | QVHLVESGGGVVQPGRSLRLSCAASGF |
| 2195 | | | | | SARS-CoV2 | RBD | Human Patient | | TFSNYGMHWVRQAPGKGLEWVAVISN |
| | | | | | | | | | DEFNKFYANSVKGRFTISRDNSKNTVYL |
| | | | | | | | | | QLNSLRTEDTARYYCAKGGDGSGWAW |
| | | | | | | | | | DGDNPPTDYWGQGTLVIVSS |
| COV2- | Ab | SARS-CoV2 | SARS-CoV1 | SARS-CoV2 | | S; RBD | B-cells; SARS-CoV2 | 325 | QMQLVQSGPEVKKPGTSVKVSCKASGF |
| 2196 | | | | | | | Human Patient | | TFMSSAVQWVRQARGQRLEWIGWIVI |
| | | | | | | | | | GSGNTNYAQKFQERVTITRDMSTSTAY |
| | | | | | | | | | MELSSLRSEDTAVYYCAAPYCSSISCNDG |
| | | | | | | | | | FDIWGQGTMVTVSS |
| COV2- | Ab | SARS-CoV2 | SARS-CoV1 | | SARS-CoV1, | S; non- | B-cells; SARS-CoV2 | 326 | EVQLVQSGAEVKKPGESLKISCKGSGYSF |
| 2197 | | | | | SARS-CoV2 | RBD | Human Patient | | TSYWIGWVRQMPGKGLEWMGIIYPGD |
| | | | | | | | | | SDTRYSPSFQGQVTISADKSISTAYLQWS |
| | | | | | | | | | SLKASDTAMYYCARPDYSSGWFSYWYF |
| | | | | | | | | | DLWGRGTLVTVSS |
| COV2- | Ab | SARS-CoV2 | SARS-CoV1 | | SARS-CoV1, | S; NTD | B-cells; SARS-CoV2 | 327 | QVQLVQSGAEVKKPGASVKVSCKVSGY |
| 2199 | | | | | SARS-CoV2 | | Human Patient | | TLTELSIHWVRQAPGKGLEWMGGFDP |
| | | | | | | | | | EDAETIYAQQFQGRVTMTEDTSTDTAY |
| | | | | | | | | | MELSSLKSEDTALYYCATGFAVFGRAAV |
| | | | | | | | | | PYWGQGTLVTVSS |
| COV2- | Ab | SARS-CoV1, | | | SARS-CoV2 | S; non- | B-cells; SARS-CoV2 | 328 | QVQLVESGGGVVQPGRSLRLSCAASGF |
| 2203 | | SARS-CoV2 | | | | RBD | Human Patient | | TFSTYAMHWVRQAPGKGLAWVALISYD |
| | | | | | | | | | GYNKYYADSVRGRFTISRINSKNTLSLQM |
| | | | | | | | | | NSLRAEDTAVYYCARGSAGNYYYGMDV |
| | | | | | | | | | WGQGTTVTVSS |
| COV2- | Ab | SARS-CoV2 | SARS-CoV1 | | SARS-CoV1, | S; non- | B-cells; SARS-CoV2 | 329 | EVQLVQSGAEVKKPGESLKISCKGSGYSF |
| 2207 | | | | | SARS-CoV2 | RBD | Human Patient | | TSHWIGWVRQMPGKGLEWMGIIYPG |
| | | | | | | | | | DSDTRYSPSFQGQVTISADKSISTAYLQW |
| | | | | | | | | | SSLKASDTAMYYCASALRERGVQLWSV |
| | | | | | | | | | WGQGTLVTVSS |
| COV2- | Ab | SARS-CoV2 | SARS-CoV1 | | SARS-CoV1, | S; NTD | B-cells; SARS-CoV2 | 330 | QVQLVESGGGVVQPGRSLRLSCAASGF |
| 2210 | | | | | SARS-CoV2 | | Human Patient | | TFSSYAMHWVRQAPGKGLEWVAVISY |
| | | | | | | | | | DGSNKYYADSVKGRFTISRDNSKNTLYL |
| | | | | | | | | | QMNSLRVEDTAVYYCARDQEWFRELFL |
| | | | | | | | | | FDYWGQGTLVTVSS |
| COV2- | Ab | SARS-CoV2 | SARS-CoV1 | | SARS-CoV1, | S; NTD | B-cells; SARS-CoV2 | 331 | EVQLVESGGGLVKPGGSLRLSCAASGFT |
| 2212 | | | | | SARS-CoV2 | | Human Patient | | FSSYSMNWVRQAPGKGLEWVSSISNSN |
| | | | | | | | | | SFIYYADSMKGRFTISRDNAKNSLYLQM |
| | | | | | | | | | NSLRAEDTAVYYCARVNGNSNWNFGSY |
| | | | | | | | | | YYYYMDVWGKGTTVTVSS |
| COV2- | Ab | SARS-CoV1, | | | SARS-CoV2 | S; non- | B-cells; SARS-CoV2 | 332 | QVQLVQSGAEVKKPGSSVKVSCKASGG |
| 2214 | | SARS-CoV2 | | | | RBD | Human Patient | | TFSSYAIIWVRQAPGQGLEWMGGIIPIF |
| | | | | | | | | | GTTNYAQKFQGRVTITADESTSTAYVELS |
| | | | | | | | | | SLRSEDTAVYYCARIGHFDSSGYYLDYW |
| | | | | | | | | | GQGTLVTVSS |
| COV2- | Ab | SARS-CoV2 | SARS-CoV1 | | SARS-CoV1, | S; NTD | B-cells; SARS-CoV2 | 333 | EVQLVESGGGLVKPGGSLRLSCAASGFT |
| 2215 | | | | | SARS-CoV2 | | Human Patient | | FSGYSMNWVRQAPGKGLEWVSSISSSS |
| | | | | | | | | | SYIYYADSVKGRFTISRDNAKNSLYLQMN |
| | | | | | | | | | SLRAEDTAVYYCARWLQLRSDYYYFGM |
| | | | | | | | | | DVWGQGTTVTVSS |
| COV2- | Ab | SARS-CoV1, | | | SARS-CoV2 | S; non- | B-cells; SARS-CoV2 | 334 | QVQLVQSGAEVKKPGSSVKVSCKASGG |
| 2216 | | SARS-CoV2 | | | | RBD | Human Patient | | TFSSYAISWVRQAPGQGLEWMGGIIPIF |
| | | | | | | | | | GAANYAQNFQGRVTITADESTSTGYMQ |
| | | | | | | | | | LSSLRFEDTAVYYCARTSHYDSSGSYFEY |
| | | | | | | | | | WGQGTLVTVSS |
| COV2- | Ab | SARS-CoV1, | | | SARS-CoV2 | S; non- | B-cells; SARS-CoV2 | 335 | QVQLVESGGGVVQPGRSLRLSCAASGF |
| 2218 | | SARS-CoV2 | | | | RBD | Human Patient | | TFSSYALFWVRQAPGKGLEWVAVISYD |
| | | | | | | | | | GNNKYYADSVRGRFTISRDNSKNTLYLQ |
| | | | | | | | | | MNSLRPEDTAVYYCARPYTGSYKSYMD |
| | | | | | | | | | VWGKGTTVTVSS |
| COV2- | Ab | SARS-CoV2 | SARS-CoV1 | | SARS-CoV1, | S; NTD | B-cells; SARS-CoV2 | 336 | QVQLQESGPGLVKPSETLSLTCTVSGGSI |
| 2222 | | | | | SARS-CoV2 | | Human Patient | | SSYYWSWIRQPPGKGLEWIGYIYYSGST |
| | | | | | | | | | NYNPSLKSRVTISVDMSKNQFSLKLRSVT |
| | | | | | | | | | AADTAVYYCARAPRERLQWGEYYFDYW |
| | | | | | | | | | GQGTLVTVSS |
| COV2- | Ab | SARS-CoV1, | | | SARS-CoV2 | S; non- | B-cells; SARS-CoV2 | 337 | QVQLVESGGGVVQPGRSLRLSCAASGF |
| 2224 | | SARS-CoV2 | | | | RBD | Human Patient | | TFSTYGMHWVRQAPGKGLEWVAVISY |
| | | | | | | | | | DGSNKYYADSVKGRFTISRDNSKNTLYL |
| | | | | | | | | | QMNSLRAEDTAMYYCAKDGSIAAADY |
| | | | | | | | | | WGQGTLVTVSS |
| COV2- | Ab | SARS-CoV2 | SARS-CoV1 | | SARS-CoV1, | S; non- | B-cells; SARS-CoV2 | 338 | EVQLVQSGAEVKKPGESLKISCKGSGYSF |
| 2226 | | | | | SARS-CoV2 | RBD | Human Patient | | TNSWIGWVRQMPGKGLEWMGIIYPG |
| | | | | | | | | | DSDTRYSPSFQGQVTISADKSISTAYLQW |
| | | | | | | | | | SSLKASDTAIYYCATHRCSGGFCYLAYWG |
| | | | | | | | | | QGTLVTVSS |
| COV2- | Ab | SARS-CoV1, | | | SARS-CoV2 | S; non- | B-cells; SARS-CoV2 | 339 | QVQLVESGGGVVQPGRSLRLSCAASGF |
| 2227 | | SARS-CoV2 | | | | RBD | Human Patient | | TFSSYGMHWVRQAPGKGLEWVAVIWY |
| | | | | | | | | | DGSKKDYADSVKGRFTISRDNSKNTLYL |
| | | | | | | | | | QMNSLRAEDTAVYYCARDQSQGAYILT |
| | | | | | | | | | GYRGYGMDVWGQGTTVTVSS |
| COV2- | Ab | SARS-CoV2 | SARS-CoV1 | | SARS-CoV1, | S; NTD | B-cells; SARS-CoV2 | 340 | QVQLQQWGAGLLKPSETLSLTCAVYGG |
| 2228 | | | | | SARS-CoV2 | | Human Patient | | SFSGHYWSWIRQPPGKGLEWIGEINHS |
| | | | | | | | | | GSTNYNPSLKSRVTISVDTSKNQFSLKLSS |
| | | | | | | | | | VTAADTAVYYCARPPQAARIHYYYYMD |
| | | | | | | | | | VWGKGTTVTVSS |
| COV2- | Ab | SARS-CoV1, | | | SARS-CoV2 | S; RBD | B-cells; SARS-CoV2 | 341 | EVQLVESGGGLVQPGRSLRLSCAASGFT |
| 2231 | | SARS-CoV2 | | | | | Human Patient | | FDDYAMNWVRQPPGKGLEWVSGISW |
| | | | | | | | | | NSDSIGYADSVKGRFTISRDNAKNSLYLQ |
| | | | | | | | | | MNSLRAEDTAMYYCAKGRGAGYTSYM |
| | | | | | | | | | DVWGKGTTVTVSS |
| COV2- | Ab | SARS-CoV1, | | | SARS-CoV2 | S; non- | B-cells; SARS-CoV2 | 342 | EVQLVESGGGLIQPGGSLRLSCAASGFIV |
| 2235 | | SARS-CoV2 | | | | RBD | Human Patient | | SSNYMSWVRQAPGKGLEWVSVIYSGG |
| | | | | | | | | | STYYADSVKGRFTISRDNSKNTLYLQMN |
| | | | | | | | | | SLRAEDTAVYYCARESTQWGQGTLVTV |
| | | | | | | | | | SS |
| COV2- | Ab | SARS-CoV2 | SARS-CoV1 | | SARS-CoV1, | S; non- | B-cells; SARS-CoV2 | 343 | QITLKESGPPLVEPKQTLTLTCTFSGFSL |
| 2238 | | | | | SARS-CoV2 | RBD | Human Patient | | TTSGEAVGWIRQPPGKALEWLALIYWDD |
| | | | | | | | | | DKHYSPSLRNRLTITRDTSKNQVVLTLTN |
| | | | | | | | | | VDPADTGTYYCAHRAVILNFDHWGQGF |
| | | | | | | | | | LVTVSS |
| COV2- | Ab | SARS-CoV1, | | | SARS-CoV2 | S; non- | B-cells; SARS-CoV2 | 344 | QVQLVESGGGVVQPGRSLRLSCAASGF |
| 2239 | | SARS-CoV2 | | | | RBD | Human Patient | | TFSSYAMHWVRQAPGKGLEWVAVISY |
| | | | | | | | | | DGINKYYADAVKGRFTISRDNSKNTLYL |
| | | | | | | | | | QMNSLRAEDTAVYYCARPRSGSYYAYFD |
| | | | | | | | | | YWGQGTLVTVSS |
| COV2- | Ab | SARS-CoV2 | SARS-CoV1 | | SARS-CoV1, | S; RBD | B-cells; SARS-CoV2 | 345 | EVQLVESGGGLVQPGRSLRLSCAASGFT |
| 2240 | | | | | SARS-CoV2 | | Human Patient | | FDDYAMHWVRQAPGKGLEWVSGISW |
| | | | | | | | | | NSGSIGYADSVKGRFTISRDNAKNSLYLQ |
| | | | | | | | | | MNSLRAEDTALYYCAKVGYTISRQWLV |
| | | | | | | | | | GEFDYWGQGTLVTVSS |
| COV2- | Ab | SARS-CoV2 | SARS-CoV1 | | SARS-CoV1, | S; non- | B-cells; SARS-CoV2 | 346 | EVQLVQSGAEVKKPGESLKISCKGSGYSF |
| 2241 | | | | | SARS-CoV2 | RBD | Human Patient | | TSYWIDWVRQMPGKGLEWMGIIYPGD |
| | | | | | | | | | SDTRYSPSFQGQVTISADKSTSTAYLQW |
| | | | | | | | | | SSLKASDTAMYYCARRGEAAGIWYFDL |
| | | | | | | | | | WGRGTLVTVSS |
| COV2- | Ab | SARS-CoV2 | SARS-CoV1 | | SARS-CoV1, | S; RBD | B-cells; SARS-CoV2 | 347 | QLQLQESGPGLVKPSETLPLTCTVSGGSI |
| 2243 | | | | | SARS-CoV2 | | Human Patient | | SSSSYYWGWIRQPPGKGLQWIGNIYYS |
| | | | | | | | | | GSTYYNSSLKSRVTISVDTSKNQFSLKLS |
| | | | | | | | | | SVTAADTAVYYCARQSRGYSYAWSFDYW |
| | | | | | | | | | GQGTLVTVSS |
| COV2- | Ab | SARS-CoV2 | SARS-CoV1 | | SARS-CoV1, | S; non- | B-cells; SARS-CoV2 | 348 | QVQLVESGGGVVQPGRSLRLSCAASGF |
| 2245 | | | | | SARS-CoV2 | RBD | Human Patient | | TFSNYGIHWVRQAPGQGLEWVAGIWY |
| | | | | | | | | | DGSNKYYVDSVKGRFTISRDNSKNTLYL |
| | | | | | | | | | QMNSLRAEDTAVYYCAGSSGEGGLYYY |
| | | | | | | | | | YGMDVWGQGTTVTVSS |
| COV2- | Ab | SARS-CoV2 | SARS-CoV1 | | SARS-CoV1, | S; non- | B-cells; SARS-CoV2 | 349 | QVQLVESGGGVVQPGRSLRLSCAASGF |
| 2248 | | | | | SARS-CoV2 | RBD | Human Patient | | TFDSYGVHWVRQAPGKGLEWVAVISYD |
| | | | | | | | | | GSNKHYADSVKGRFTISRDNSKNTLYVQ |
| | | | | | | | | | MNSLRTEDTAVYYCARDSGGNYGDSYF |
| | | | | | | | | | DYWGQGTLVTVSS |
| COV2- | Ab | SARS-CoV1, | | | SARS-CoV2 | S; non- | B-cells; SARS-CoV2 | 350 | QVQLVESGGGVVQPGRSLRLSCAASGF |
| 2250 | | SARS-CoV2 | | | | RBD | Human Patient | | TFSTYAMHWVRQAPGKGLAWVALISYD |
| | | | | | | | | | GYNKYYADSVRGRFTISRINSKNTLSLQM |
| | | | | | | | | | NSLRAEDTAVYYCARGSAGNYYYGMDV |
| | | | | | | | | | WGQGTTVTVSS |
| COV2- | Ab | SARS-CoV2 | SARS-CoV1 | | SARS-CoV1, | S; NTD | B-cells; SARS-CoV2 | 351 | QVTLKESGPVLVKPTETLTLTCAVSGFSL |
| 2251 | | | | | SARS-CoV2 | | Human Patient | | SNAKMGVSWIRQPPGKALEWLAHIFSN |
| | | | | | | | | | DEKAYSTSLKTRLTISKDTSKSQVVLTVT |
| | | | | | | | | | NMDPVDTATYYCARIVLGASGTYPSPGFD |
| | | | | | | | | | PWGQGTLVTVSS |
| COV2- | Ab | SARS-CoV2 | SARS-CoV1 | | SARS-CoV1, | S; RBD | B-cells; SARS-CoV2 | 352 | EVQLVESGGGLVQPGGSLRLSCAASGFT |
| 2253 | | | | | SARS-CoV2 | | Human Patient | | FSSYWMHWVRQVPGKGLVWVSRINSD |
| | | | | | | | | | GSSTSYADSVKGRFTISRDNAKNTLYLE |
| | | | | | | | | | MNSLRAQDTAVYYCAGSPWLRGDIDY |
| | | | | | | | | | WGQGTLVTVSS |
| COV2- | Ab | SARS-CoV1, | | | SARS-CoV2 | S; RBD | B-cells; SARS-CoV2 | 353 | QVQLVQSGSELTKPGASVKVSCKASGYT |
| 2256 | | SARS-CoV2 | | | | | Human Patient | | FTSYAMNWVRQAPGQGLEWMGWINT |
| | | | | | | | | | DTGNPTYAQGFTGRFVFSLDTSVSTAYL |
| | | | | | | | | | QISSLKAEDTAVYYCARDPSYCSSTRCYT |
| | | | | | | | | | VGWFDPWGQGTLVTVSS |
| COV2- | Ab | SARS-CoV2 | SARS-CoV1 | | SARS-CoV1, | S; NTD | B-cells; SARS-CoV2 | 354 | QVQLQESGPGLVKPSQTLSLTCTVSGDSI |
| 2257 | | | | | SARS-CoV2 | | Human Patient | | NSGNYYWSWIRQPAGKGLEWIGRMFT |
| | | | | | | | | | SGSTNYNPSLTSRVTMSIDTSKNQFSLNL |
| | | | | | | | | | NSVTAADTAMYYCARGHVAAWESCYY |
| | | | | | | | | | WGQGILVTVSS |
| COV2- | Ab | SARS-CoV1, | | SARS-CoV2 | | S; RBD | B-cells; SARS-CoV2 | 355 | EVQLVESGGGVVRPGGSLRLSCAASGFT |
| 2258 | | SARS-CoV2 | | | | | Human Patient | | LDDYGLSWVRHAPGKGLEWVSGINWN |
| | | | | | | | | | GGRTAYADSVKGRFTISRDNAKNSLYLQ |
| | | | | | | | | | MNSLRAEDTALYHCARARGPSEQYYDLL |
| | | | | | | | | | TGYYDAFDIWGQGTMVTVSS |
| COV2- | Ab | SARS-CoV2 | SARS-CoV1 | | SARS-CoV1, | S; NTD | B-cells; SARS-CoV2 | 356 | EVQLLESGGGLVHPGGSLRLSCAASGFT |
| 2260 | | | | | SARS-CoV2 | | Human Patient | | FSSYALSWVRQAPGKGLEWVSAISGSG |
| | | | | | | | | | GSTYYADSVKGRFTISRDNSKNTLYLQM |
| | | | | | | | | | NRLRAEDTAVYYCAQMGPLGSTSSAAD |
| | | | | | | | | | YWGQGTLVTVSS |
| COV2- | Ab | SARS-CoV2 | SARS-CoV1 | SARS-CoV2 | | S; non- | B-cells; SARS-CoV2 | 357 | QVQLVQSGAEVKKPGASVKVSCKASGY |
| 2262 | | | | (weak) | | RBD | Human Patient | | TFTSYDINWVRQATGQGLEWMGWMN |
| | | | | | | | | | PNSGNTGYAQKFQGRVTMTRNTSISTA |
| | | | | | | | | | YMELSSLRSEDTALYYCAREARYFDWIFE |
| | | | | | | | | | GSDYYYYGMDVWGQGTTVTVSS |
| COV2- | Ab | SARS-CoV2 | SARS-CoV1 | | SARS-CoV1, | S; NTD | B-cells; SARS-CoV2 | 358 | EVQLVESGGGLVQPGGSLRLSCEASGFT |
| 2263 | | | | | SARS-CoV2 | | Human Patient | | FSSSEINWVRQAPGKGLEWVSHISSSGSI |
| | | | | | | | | | IYYADSVKGRFTISRDNAKNSLYLQMNSL |
| | | | | | | | | | RAEDTAVYYCARRSYRSSWYYYYGMDV |
| | | | | | | | | | WGQGTTVTVSS |
| COV2- | Ab | SARS-CoV1, | | | SARS-CoV2 | S; non- | B-cells; SARS-CoV2 | 359 | EVQLVESGGGLVQPGRSLRLSCTASGFIF |
| 2266 | | SARS-CoV2 | | | | RBD | Human Patient | | GDYAMGWVRQAPGKGLEWVGFIRGK |
| | | | | | | | | | AYDGTTEYAASVKGRFTISRDDSKYIAHL |
| | | | | | | | | | QMNSLKTEDTAVYYCIRDYDFWGGYYY |
| | | | | | | | | | HPLRAFDIWGRGTMVTVSS |
| COV2- | Ab | SARS-CoV2 | SARS-CoV1 | SARS-CoV2 | | S; RBD | B-cells; SARS-CoV2 | 360 | QITLKESGPTLVKPTQTLTLTCTFSGFSL |
| 2268 | | | | | | | Human Patient | | STSGVGVGWIRQPPGKALEWLALIYWD |
| | | | | | | | | | DDKRYSPSLKSRLSITKDTSKNQVVLTMT |
| | | | | | | | | | NMDPVDTGTYYCARHQIVVLFDMWG |
| | | | | | | | | | QGTRVTVSS |
| COV2- | Ab | SARS-CoV1, | | | SARS-CoV2 | S; non- | B-cells; SARS-CoV2 | 361 | QVQLVQSGAEVKKPGSSVKVSCKASGG |
| 2270 | | SARS-CoV2 | | | | RBD | Human Patient | | TFSSYAISWVRQAPGQGLEWMGGIIPIF |
| | | | | | | | | | GTANYAQKFQGRVTITADESTSTAYMEL |
| | | | | | | | | | SSLRSEDTAVYYCAITYYYDSSGYWWDD |
| | | | | | | | | | WGQGTLVTVSS |
| COV2- | Ab | SARS-CoV1, | | | SARS-CoV2 | S; non- | B-cells; SARS-CoV2 | 362 | QLQLQESGPGLVKPSETLSLTCTVSGGSI |
| 2273 | | SARS-CoV2 | | | | RBD | Human Patient | | SSSSYYWGWIRQPPGKGLEWIGTIYYSG |
| | | | | | | | | | STYYNPSLKSRVTISVDTSKKQFSLKLSS |
| | | | | | | | | | VTAADTAVYYCAGEEVRGVKLYYYYAMD |
| | | | | | | | | | VWGQGTTVTVSS |
| COV2- | Ab | SARS-CoV1, | | | SARS-CoV2 | S; non- | B-cells; SARS-CoV2 | 363 | EVQLVESGGRLVLPGGSLRLSCAASGFTF |
| 2274 | | SARS-CoV2 | | | | RBD | Human Patient | | SVYEMNWVRQAPGKGLEWLSYIGTSGS |
| | | | | | | | | | PIYYADSVKGRFTVSRDNAKNSLYLQMN |
| | | | | | | | | | SLRVEDTALYYCARDRGWNYGLDYWG |
| | | | | | | | | | QGTLVTVSS |
| COV2- | Ab | SARS-CoV2 | SARS-CoV1 | | SARS-CoV1, | S; RBD | B-cells; SARS-CoV2 | 364 | QVQLVESGGGVVQPGRSLRLSCAASGF |
| 2277 | | | | | SARS-CoV2 | | Human Patient | | TFSSYAMHWVRQAPGKGLEWVALISSD |
| | | | | | | | | | GGNKFYADSVKGRFTISRDNSKNTLYLQ |
| | | | | | | | | | MNSLRAEDTAVYYCARDVPTTVTAFTVF |
| | | | | | | | | | TYWGQGTLVTVSS |
| COV2- | Ab | SARS-CoV1, | | | SARS-CoV2 | S; non- | B-cells; SARS-CoV2 | 365 | QVQLVESGGGVVQPGRSLRLSCAASGF |
| 2281 | | SARS-CoV2 | | | | RBD | Human Patient | | AFSNYAIHWVRQAPGKGLEWVAVISYD |
| | | | | | | | | | GNNKDYADSVKGRFTISRDNSKNTLYLQ |
| | | | | | | | | | MNSLRAEDTAVYYCARVPVMVRGVYF |
| | | | | | | | | | DYWGQGTLVTVSS |
| COV2- | Ab | SARS-CoV1, | | | SARS-CoV2 | S; RBD | B-cells; SARS-CoV2 | 366 | QVQLVQSGAEVKKPGASVKVSCKVSGY |
| 2287 | | SARS-CoV2 | | | | | Human Patient | | TFTSYDINWVRQATGQGLEWMGWMN |
| | | | | | | | | | PNSGHTGYAQKFQGRVTMTRNTSISTA |
| | | | | | | | | | YMELSSLRYEDTAVYYCARGYGLTYYMD |
| | | | | | | | | | VWGKGTTVTVSS |
| COV2- | Ab | SARS-CoV2 | SARS-CoV1 | SARS-CoV2 | | S; RBD | B-cells; SARS-CoV2 | 367 | QVQLAQSGAEVKKPGASVKVSCKAAGY |
| 2290 | | | | (weak) | | | Human Patient | | TFTSYDINWVRQATGQGLEWMGWMN |
| | | | | | | | | | PNSGNAGYAQKFQGRVTMTRDTSISTA |
| | | | | | | | | | YMELSSLRSEDTAVYYCARMRSGWPTH |
| | | | | | | | | | GRPDDFWGRGTLVTVSS |
| COV2- | Ab | SARS-CoV2 | SARS-CoV1 | | SARS-CoV1, | S; NTD | B-cells; SARS-CoV2 | 368 | EVQLLQSGGGLVQPGGSLRLSCAASGFT |
| 2293 | | | | | SARS-CoV2 | | Human Patient | | FRNYAMSWVRQAPGKGLEWVSAISGS |
| | | | | | | | | | GGTTYYADSVKGRFTISRDNSKNTLYLQ |
| | | | | | | | | | MNSLRAEDTAVYYCAKNERITMLVVVTL |
| | | | | | | | | | FDYWGQGTLVTVSS |
| COV2- | Ab | SARS-CoV2 | SARS-CoV1 | | SARS-CoV1, | S; non- | B-cells; SARS-CoV2 | 369 | EVQLVESGGGLVQPGGSLRLSCAASGFT |
| 2296 | | | | | SARS-CoV2 | RBD | Human Patient | | VSGNYMSWVRQAPGKGLEWVSVIYSG |
| | | | | | | | | | GSTYYADSVKGRFTISRDNSKNTLYLQM |
| | | | | | | | | | NSPRAEDTAVYYCARDPSAYYDILTGYSG |
| | | | | | | | | | DVWGKGTTVTVSS |
| COV2- | Ab | SARS-CoV2 | SARS-CoV1 | | SARS-CoV1, | S; RBD | B-cells; SARS-CoV2 | 370 | QVQLVESGGGVVQPGRSLRLSCAASGF |
| 2299 | | | | | SARS-CoV2 | | Human Patient | | SFSSYVMNWVRQAPGKGLEWVAVISY |
| | | | | | | | | | DGSSKYYADSVKGRFTISRDNSKNTLYLQ |
| | | | | | | | | | MNSLRAEDTAVYYCARDIDSGYDPTPVF |
| | | | | | | | | | DYWGQGTLVTVSS |
| COV2- | Ab | SARS-CoV2 | SARS-CoV1 | | SARS-CoV1, | S; non- | B-cells; SARS-CoV2 | 371 | QVQLQESGPGLVKPSGTLSLTCAVSGGS |
| 2300 | | | | | SARS-CoV2 | RBD | Human Patient | | ISSSNWWTWVRQPPGKGLEWIGEIYHS |
| | | | | | | | | | GSTNYNPSLKSRVTISVDKSKNQFSLKLS |
| | | | | | | | | | SVTAADTAVYYCASRWGDYFDSSGAYDS |
| | | | | | | | | | WGQGTLVTVSS |
| COV2- | Ab | SARS-CoV2 | SARS-CoV1 | | SARS-CoV1, | S; RBD | B-cells; SARS-CoV2 | 372 | EVQLVESGGGLVKPGGSLRLSCAASGFT |
| 2304 | | | | | SARS-CoV2 | | Human Patient | | FSSYSMNWVRQAPGKGLEWVSCISSSS |
| | | | | | | | | | SFIYYADSVKGRFTISRDNAKNSLYLQMN |
| | | | | | | | | | SLRAEDTAVYYCARDPVWVDGELLSGGI |
| | | | | | | | | | PFDYWGQGTLVTVSS |
| COV2- | Ab | SARS-CoV2 | SARS-CoV1 | | SARS-CoV1, | S; NTD | B-cells; SARS-CoV2 | 373 | QLQLQESGPGLVKPSETLSLTCTVSGGSI |
| 2305 | | | | | SARS-CoV2 | | Human Patient | | RSSSYYWGWIRQPPGKGLEWIASIYYSG |
| | | | | | | | | | STYYNSSLKSRVTISVDTSKNQFSLKVNS |
| | | | | | | | | | MTAADTAVYYCAILWRGSSWADRHYYY |
| | | | | | | | | | YSMDVWGQGTTVTVSS |
| COV2- | Ab | SARS-CoV2 | SARS-CoV1 | | SARS-CoV1, | S; NTD | B-cells; SARS-CoV2 | 374 | QVQLVESGGGVVQPGRSLRLSCTASGFT |
| 2307 | | | | | SARS-CoV2 | | Human Patient | | FSSYAMHWVRQAPGKGLEWVALISYD |
| | | | | | | | | | GNNKYYADSAKGRFTISRDNSKNTLYLQ |
| | | | | | | | | | MNSLRSEDTAVYYCARDLGRGLDPWG |
| | | | | | | | | | QGTLVTVSS |
| COV2- | Ab | SARS-CoV2 | SARS-CoV1 | SARS-CoV2 | | S; RBD | B-cells; SARS-CoV2 | 375 | EVQLLESGGGLIQPGGSLRLSCAASGFTF |
| 2308 | | | | | | | Human Patient | | SNYAMSWVRQAPGKGLEWVSGIISSSG |
| | | | | | | | | | GATYNADSVRGRFTTSRDNSKNILYLQM |
| | | | | | | | | | NSLRGEDTAVYYCVKGLFDWFPLWGQ |
| | | | | | | | | | GTMVTVSS |
| COV2- | Ab | SARS-CoV1, | | | SARS-CoV2 | S; non- | B-cells; SARS-CoV2 | 376 | QVQLQESGPGLVKPSQTLSLTCAVSGAS |
| 2310 | | SARS-CoV2 | | | | RBD | Human Patient | | ISSGSYYWSWIRQPAGKGLEWIGRIYTS |
| | | | | | | | | | GNTNYNPSLKSRVTISVDTSKNQFSLKLS |
| | | | | | | | | | SVTAADTAVYYCATGYIGTYYYYMDVW |
| | | | | | | | | | GKGTTVTVSS |
| COV2- | Ab | SARS-CoV1, | | | SARS-CoV2 | S; RBD | B-cells; SARS-CoV2 | 377 | EVQLVESGGGLVQPGRSLRLSCAASGFT |
| 2313 | | SARS-CoV2 | | | | | Human Patient | | FDDYAMHWVRQAPGKGLEWVSGISW |
| | | | | | | | | | NSGSIGYADSVKGRFTISRDNAKNSLYLQ |
| | | | | | | | | | MNSLRAEDTALYYCAKVSSITSLLGYYFD |
| | | | | | | | | | SWGQGTLVTVSS |
| COV2- | Ab | SARS-CoV2 | SARS-CoV1 | | SARS-CoV1, | S; RBD | B-cells; SARS-CoV2 | 378 | QVTLRESGPALVKPTQTLSLTCTFSGFSL |
| 2318 | | | | | SARS-CoV2 | | Human Patient | | GTSGMCVSWIRQPPGKALEWLARIDW |
| | | | | | | | | | DDDKYYSTSLKTRLTISKDTSKNQVVLTM |
| | | | | | | | | | TNMDPVDTATYYCARGVVTYDYWGQG |
| | | | | | | | | | TLVTVSS |
| COV2- | Ab | SARS-CoV1, | | | SARS-CoV2 | S; non- | B-cells; SARS-CoV2 | 379 | QVQLVESGGGVVQPGRSLRLSCAASGF |
| 2322 | | SARS-CoV2 | | | | RBD | Human Patient | | TFSNYAMHWVRQAPGKGLDWVAVISY |
| | | | | | | | | | DGSNRYYAASVKGRFTISRDNSKNTLYL |
| | | | | | | | | | QMNSLRTEDTAVYFCARGDGYRSQFDP |
| | | | | | | | | | WGQGTLVTVSS |
| COV2- | Ab | SARS-CoV1, | | | SARS-CoV2 | S; non- | B-cells; SARS-CoV2 | 380 | QITFKESGPTLVKPTETLTLTCTFSGFSV |
| 2325 | | SARS-CoV2 | | | | RBD | Human Patient | | STSGEGVGWIRQPPGKALEWLAVIYWD |
| | | | | | | | | | DDKRYSPSLKSRLTITRDTSKNQVVLTMT |
| | | | | | | | | | NMDPVDTATYYCAHRLWFRDAFDIWG |
| | | | | | | | | | QGTTVTVSS |
| COV2- | Ab | SARS-CoV1, | | | SARS-CoV2 | S; RBD | B-cells; SARS-CoV2 | 381 | EVQLLESGGGLVQPGGSLRLSCAASGFT |
| 2329 | | SARS-CoV2 | | | | | Human Patient | | FNNYAMSWVRQAPGKGLEWVSAIGGS |
| | | | | | | | | | GGSTYYADSVKGRFTVSRDNSENTLYLQ |
| | | | | | | | | | MSSLRAEDTAVYYCARVEGDWLLGGPY |
| | | | | | | | | | YHYYGMDVWGQGTTVTVSS |
| COV2- | Ab | SARS-CoV1, | | | SARS-CoV2 | S; RBD | B-cells; SARS-CoV2 | 382 | QLQLQESGPGLVKPSETLSLTCTVSGGSI |
| 2331 | | SARS-CoV2 | | | | | Human Patient | | SSSSYYWGWIRQPPGNGLEWIGSIYYSG |
| | | | | | | | | | STYYNPSLKGRVSISVDTSKNQFSLKLSS |
| | | | | | | | | | VTAADTAVYYCARILVIFTLNWFDPWGQ |
| | | | | | | | | | GTLVTVSS |
| COV2- | Ab | SARS-CoV1, | | | SARS-CoV2 | S; non- | B-cells; SARS-CoV2 | 383 | EVQLVESGGGLVQPGGSLRLSCAASGFT |
| 2333 | | SARS-CoV2 | | | | RBD | Human Patient | | FSIYWMSWVRQAPGKGLQWVANIKQ |
| | | | | | | | | | DASEKYYVDSVKGRFTISRDNAKNSLYLQ |
| | | | | | | | | | MNSLRAEDTAVYYCARLGGSSWHFDY |
| | | | | | | | | | WGQGTLVTVSS |
| COV2- | Ab | SARS-CoV2 | SARS-CoV1 | | SARS-CoV1, | S; NTD | B-cells; SARS-CoV2 | 384 | QLQLQESGPGLVKPSETLSLTCTVSGGPI |
| 2335 | | | | | SARS-CoV2 | | Human Patient | | SSSRYYWGWIRQPPGKGLEWIGSIYYSG |
| | | | | | | | | | STYYNPSLKSRVTISVDTSKNQFSLKLNS |
| | | | | | | | | | VTAADTAVYYCARHDGSGEMDTITWGPI |
| | | | | | | | | | YYYMDVWGKGTTVTVSS |
| COV2- | Ab | SARS-CoV1, | | | SARS-CoV2 | S; non- | B-cells; SARS-CoV2 | 385 | QITFKESGPTLVKPTETLTLTCTFSGFSV |
| 2337 | | SARS-CoV2 | | | | RBD | Human Patient | | STSGEGVGWIRQPPGKALEWLAVIYWD |
| | | | | | | | | | DDKRYSPSLKSRLTITRDTSKNQVVLTMT |
| | | | | | | | | | NMDPVDTATYYCAHRLWFRDAFDIWG |
| | | | | | | | | | QGTTVTVSS |
| COV2- | Ab | SARS-CoV1, | | | SARS-CoV2 | S; non- | B-cells; SARS-CoV2 | 386 | QVQLVQSGAEVKKPGASVKVSCKASGY |
| 2340 | | SARS-CoV2 | | | | RBD | Human Patient | | TFTSYGMHWVRQAPGQRLEWMGWIN |
| | | | | | | | | | VGNGNTKYSQRFQGRVTITRDTSASTAY |
| | | | | | | | | | MELSSLRSEDTAVYYCAMGPSAFSWLD |
| | | | | | | | | | PWGQGTLVTVSS |
| COV2- | Ab | SARS-CoV1, | | | SARS-CoV2 | S; non- | B-cells; SARS-CoV2 | 387 | QVQLAESGGGVVQPGRSLRLSCAASGF |
| 2341 | | SARS-CoV2 | | | | RBD | Human Patient | | TFSSYAMHWVRQAPGKGLEWVAVISY |
| | | | | | | | | | DGSNKYYADSVKGRFTISRDNSKNTLYL |
| | | | | | | | | | QMNSLRAEDTAVYYCARSTSGSYYYGM |
| | | | | | | | | | DVWGQGTTVTVSS |
| COV2- | Ab | SARS-CoV1, | | | SARS-CoV2 | S; RBD | B-cells; SARS-CoV2 | 388 | QITLKESGPTLVKPTQTLTLTCTFSGFSL |
| 2342 | | SARS-CoV2 | | | | | Human Patient | | NTSGVGVGWIRQPPGKALEWLALIYWD |
| | | | | | | | | | DDKRYNPSLKSRLTITKDTSKNQVVLTM |
| | | | | | | | | | TNMDPVDTATYYCAHRPPSYHGWCYF |
| | | | | | | | | | DYWGQGNLVTVSS |
| COV2- | Ab | SARS-CoV1, | | | SARS-CoV2 | S; non- | B-cells; SARS-CoV2 | 389 | QVQVVQSGAEVKKPGASVKVSCKASGY |
| 2343 | | SARS-CoV2 | | | | RBD | Human Patient | | TFKNYGISWVRQAPGQGLEWMGWISA |
| | | | | | | | | | YTGNTNYAQKFQGRMTMTTDTSTGTG |
| | | | | | | | | | YMELRSLRSDDTAVYYCARVQRRRLDY |
| | | | | | | | | | WGQGTLVIVSS |
| COV2- | Ab | SARS-CoV2 | SARS-CoV1 | | SARS-CoV1, | S; NTD | B-cells; SARS-CoV2 | 390 | QVQLQQWGAGLLKPSETLSLTCAVYGG |
| 2346 | | | | | SARS-CoV2 | | Human Patient | | SFSGHYWSWIRQPPGKGLEWIGEINHS |
| | | | | | | | | | GSTNYNPSLKSRVTISVDTSKNQFSLKLS |
| | | | | | | | | | SVTAADTAVYYCARPPQAARIHYYYYMD |
| | | | | | | | | | VWGKGTTVTVSS |
| COV2- | Ab | SARS-CoV2 | SARS-CoV1 | | SARS-CoV1, | S; RBD | B-cells; SARS-CoV2 | 391 | EVQLVQSGAEVKKPGESLKISCKGSGYSF |
| 2351 | | | | | SARS-CoV2 | | Human Patient | | TSYWIGWVRQMPGKGLEWMGIIYPGD |
| | | | | | | | | | SDTTYNPSFQGQVTISADKSLTTAFLHW |
| | | | | | | | | | SSLKASDTAIYYCARRFYGPSSFDYWGQ |
| | | | | | | | | | GTLVIVSS |
| COV2- | Ab | SARS-CoV2 | SARS-CoV1 | | SARS-CoV1, | S; RBD | B-cells; SARS-CoV2 | 392 | QVQLVQSGAEVKRPGASMNISCKASGY |
| 2352 | | | | | SARS-CoV2 | | Human Patient | | NFNNNYIYWVRQAPGQGLEWMGVVN |
| | | | | | | | | | PTGGGTAYAQGFQDRVTITSDTPRNTVY |
| | | | | | | | | | LGVTGLHSEDTAVYFCARGGEWRIVPG |
| | | | | | | | | | GRDYFDYWGQGTLVTVSA |
| COV2- | Ab | SARS-CoV2 | SARS-CoV1 | SARS-CoV2 | | S; RBD | B-cells; SARS-CoV2 | 393 | EVQLVQSGAEVKKPGESLKISCKGFGYN |
| 2353 | | | | | | | Human Patient | | FTNYWIGWVRQMPGKGLEWMGIIYPG |
| | | | | | | | | | DSETRNSPSFQGQVTISADKSMSTAYLQ |
| | | | | | | | | | WSSLKASDTAMYYCARLGVSKYCSGGR |
| | | | | | | | | | CLSGGSNWFDPWGQGTLVTVSS |
| COV2- | Ab | SARS-CoV1, | | SARS-CoV2 | | S; RBD | B-cells; SARS-CoV2 | 394 | EVHLVGSGGGLIQPGGSLRLSCAASGFT |
| 2354 | | SARS-CoV2 | | | | | Human Patient | | VSSNFMSWVRQAPGKGLEWVSIIHNG |
| | | | | | | | | | GDSYYTDSVKGRFTISRDNSKNTLYLQIV |
| | | | | | | | | | INNLRAEDTAVYYCASSSWLRGAFDIWG |
| | | | | | | | | | QGTMVTVSS |
| COV2- | Ab | SARS-CoV2 | SARS-CoV1 | SARS-CoV2 | | S; RBD | B-cells; SARS-CoV2 | 395 | QMQLVQSGPEVKKPGTSVKVSCKTSGF |
| 2355 | | | | | | | Human Patient | | TFTSSAIQWVRQARGQRLEWIGWIVVG |
| | | | | | | | | | SGNTNYAQKFQERVTITRDMSTSTAYM |
| | | | | | | | | | ELSSLRSEDTAVYYCAAPHCNRTSCYDAF |
| | | | | | | | | | DLWGQGTMVTVSS |
| COV2- | Ab | SARS-CoV1, | | | SARS-CoV2 | S; RBD | B-cells; SARS-CoV2 | 396 | EVQLVESGGDLVKPGRSLRLSCSASGFTF |
| 2357 | | SARS-CoV2 | | | | | Human Patient | | GDYTMSWFRQAPGKGLEWVAFIRSKAY |
| | | | | | | | | | GGTTEYAASVIGRFTISRDDSKSIAYLQM |
| | | | | | | | | | NSLKSEDTAVYYCSRVRGSFYGSVGKNY |
| | | | | | | | | | GMDVWGQGTTVTVSS |
| COV2- | Ab | SARS-CoV1, | | | SARS-CoV2 | S; RBD | B-cells; SARS-CoV2 | 397 | QVQLVESGGGVVQPGRSLRLSCAASGF |
| 2358 | | SARS-CoV2 | | | | | Human Patient | | SFSSYVMNWVRQAPGKGLEWVAVISY |
| | | | | | | | | | DGSSKYYADSVKGRFTISRDNSKNTLYLQ |
| | | | | | | | | | MNSLRAEDTAVYYCARDIDSGYDPTPVF |
| | | | | | | | | | DYWGQGTLVTVSS |
| COV2- | Ab | SARS-CoV1, | | | SARS-CoV2 | S; non- | B-cells; SARS-CoV2 | 398 | QVQLVQSGAEVKKPGSSVKVSCKASGG |
| 2367 | | SARS-CoV2 | | | | RBD | Human Patient | | TFSSYAISWVRQAPGQGLEWMGGIIPIF |
| | | | | | | | | | GAANYAQNFQGRVTITADESTSTGYMQ |
| | | | | | | | | | LSSLRFEDTAVYYCARTSHYDSSGSYFEY |
| | | | | | | | | | WGQGTLVTVSS |
| COV2- | Ab | SARS-CoV2 | SARS-CoV1 | | SARS-CoV1, | S; non- | B-cells; SARS-CoV2 | 399 | EVQLVQSGAEVKKPGESLKISCKGSGYSF |
| 2368 | | | | | SARS-CoV2 | RBD | Human Patient | | TTYWIGWVRQMPGKGLEWMGIIYPGD |
| | | | | | | | | | SDTRYSPSFQGQVTISADKSISTAYLQWS |
| | | | | | | | | | SLKASDTAMYYCARRRGGIGIEYGMDV |
| | | | | | | | | | WGQGTTVTVSS |
| COV2- | Ab | SARS-CoV2 | SARS-CoV1 | | SARS-CoV1, | S; non- | B-cells; SARS-CoV2 | 400 | QVQLVESGGGVVQPGRSLRLSCAASGF |
| 2369 | | | | | SARS-CoV2 | RBD | Human Patient | | TFSSYAMHWVRQAPGKGLEWVADISY |
| | | | | | | | | | DGSEKYYADSVKGRFTIYRDNSKNTLYLQ |
| | | | | | | | | | MNSLRAEDTAVYYCAKDFGGDNTAMV |
| | | | | | | | | | EYFFDFWGQGTLVTVSS |
| COV2- | Ab | SARS-CoV2 | SARS-CoV1 | | SARS-CoV1, | S; RBD | B-cells; SARS-CoV2 | 401 | QVQLQESGPGLVKPSETLSLTCTVSGGS |
| 2370 | | | | | SARS-CoV2 | | Human Patient | | VSSGSYYWSWIRQPPGKGLECIGYIYYSG |
| | | | | | | | | | SSNYNPSLKSRVTISVDTSKNQFSLKMSS |
| | | | | | | | | | VTAADTAVYYCAGSPVPPTIVGASYWG |
| | | | | | | | | | QGTLVTDSS |
| COV2- | Ab | SARS-CoV1, | | | SARS-CoV2 | S; non- | B-cells; SARS-CoV2 | 402 | QVQLVESGGGVVQPGRSLRLSCAASGF |
| 2371 | | SARS-CoV2 | | | | RBD | Human Patient | | TFSNYGMHWVRQAPGKGLEWVAVISY |
| | | | | | | | | | DGTNKYYADSVKGRFTISRDNSKNTLYL |
| | | | | | | | | | QMNSLRADDTAVYYCAKGRGNYLTFFD |
| | | | | | | | | | SWGQGTLVTVSS |
| COV2- | Ab | SARS-CoV2 | SARS-CoV1 | | SARS-CoV1, | S; non- | B-cells; SARS-CoV2 | 403 | EVQLVESGGGLVQPGGSLRLSCAASGLT |
| 2373 | | | | | SARS-CoV2 | RBD | Human Patient | | VSSNYMSWVRQAPGKGLEWVSVIYSG |
| | | | | | | | | | GSTYYADSVKGRFTISGDNSKNTLYLQM |
| | | | | | | | | | NSLRVDDTAVYYCARDPGSRYSGGWYD |
| | | | | | | | | | YYYAMDVWGQGTTVTVSS |
| COV2- | Ab | SARS-CoV2 | SARS-CoV1 | | SARS-CoV1, | S; non- | B-cells; SARS-CoV2 | 404 | EVQLVQSGAEVKKPGESLKISCKGSGYSF |
| 2378 | | | | | SARS-CoV2 | RBD | Human Patient | | PTYWIGWVRQMPGKGLEWMGIIYPGD |
| | | | | | | | | | SDTRYGPSFQGQVTISADKSISTAYLQWS |
| | | | | | | | | | SLKASDTAMYYCARRDTDFDYWGQGTL |
| | | | | | | | | | VTVSS |
| COV2- | Ab | SARS-CoV2 | SARS-CoV1 | SARS-CoV2 | | S; RBD | B-cells; SARS-CoV2 | 405 | QMQLVQSGPEVKKPGTSVKVSCKASGF |
| 2381 | | | | | | | Human Patient | | TFTSSAVQWVRQARGQRLEWIGWIAV |
| | | | | | | | | | GSGNTNYAQKFQERVSITRDMSTSTAY |
| | | | | | | | | | MELSSLRSEDTAVYYCAAPYCSRTSCHD |
| | | | | | | | | | AFDIWGQGTKVTVSS |
| COV2- | Ab | SARS-CoV1, | | | SARS-CoV2 | S; RBD | B-cells; SARS-CoV2 | 406 | QVQLVESGGGVVQPGRSLRLSCVASGF |
| 2382 | | SARS-CoV2 | | | | | Human Patient | | TFSSYGMHWVRQAPGKGLEWVAVISF |
| | | | | | | | | | DGSNKYYADSVKGRFTISRDNSKNTLYL |
| | | | | | | | | | QMNSLRAEDTAVFYCAKDLPPYASGWY |
| | | | | | | | | | EGGFDYWGRGTQVTVSS |
| COV2- | Ab | SARS-CoV2 | SARS-CoV1 | | SARS-CoV1, | S; non- | B-cells; SARS-CoV2 | 407 | QVQLVESGGGVVQPGRSLRLSCAASGF |
| 2383 | | | | | SARS-CoV2 | RBD | Human Patient | | TFSSYGMHWVRQAPGKGLEWVAVVSY |
| | | | | | | | | | DGSNKYYTDSVKGRFTISRDNSKNTLFLQ |
| | | | | | | | | | MIGLREEDTAVYYCAQGRGGYYSPFDD |
| | | | | | | | | | WGQGTLVTVSS |
| COV2- | Ab | SARS-CoV2 | SARS-CoV1 | | SARS-CoV1, | S; NTD | B-cells; SARS-CoV2 | 408 | QVTLKESGPVLVKPTETLTLTCTVSGFSL |
| 2384 | | | | | SARS-CoV2 | | Human Patient | | SNARMGVSWIRQPPGKALEWLAHIFSG |
| | | | | | | | | | DEKSYSTSLKSRLTISKDTSKSQVVLTMT |
| | | | | | | | | | NMDPLDTATYYCARTTWGTWIQAWYF |
| | | | | | | | | | DIWGRGTLVTVSS |
| COV2- | Ab | SARS-CoV2 | SARS-CoV1 | | SARS-CoV1, | S; non- | B-cells; SARS-CoV2 | 409 | QVQLVESGGGVVQPGRSLRLSCAASGF |
| 2386 | | | | | SARS-CoV2 | RBD | Human Patient | | TFSSYGMHWVRQAPGKGLEWVAVIWF |
| | | | | | | | | | DGSNKHYADSVKGRFTISRDNSKNTLYL |
| | | | | | | | | | QMNSLRAEDTAVYYCAREGDFWSGYYT |
| | | | | | | | | | GWFDPWGQGTLVTVSS |
| COV2- | Ab | SARS-CoV1, | | | SARS-CoV2 | S; non- | B-cells; SARS-CoV2 | 410 | QVQLVESGGGVVQPGRSLRLSCAASGF |
| 2387 | | SARS-CoV2 | | | | RBD | Human Patient | | TFSSYGMHWVRQAPGKGLEWVAVISY |
| | | | | | | | | | DGSNKYYADSVKGRFTISRDNSKNTLYL |
| | | | | | | | | | QMNSLRAEDTAVYYCAKDLTIVVIPAAP |
| | | | | | | | | | NFDYWGQGTLVTVSS |
| COV2- | Ab | SARS-CoV1, | | | SARS-CoV2 | S; non- | B-cells; SARS-CoV2 | 411 | EVQLLESGGGLVQPGGSLRLSCAASGFT |
| 2388 | | SARS-CoV2 | | | | RBD | Human Patient | | FSSYAMSWVRQAPGKGLEWVSFISGTG |
| | | | | | | | | | DSTYYADSVKGRFTISRDNSKNTLYLQM |
| | | | | | | | | | NSLRAEDTAVYYCAKDQARVQDYIWGS |
| | | | | | | | | | YRSYGMDVWGLGTTVTVSS |
| COV2- | Ab | SARS-CoV2 | SARS-CoV1 | SARS-CoV2 | | S; RBD | B-cells; SARS-CoV2 | 412 | EVQLVESGGGLVQPGRSLRLSCAASGFT |
| 2389 | | | | | | | Human Patient | | FDDYAMHWVRQAPGKGLEWVSGISW |
| | | | | | | | | | NSGTIGYADSVKGRFIISRDNAKNSLYLQ |
| | | | | | | | | | MNSLRPEDTALYYCAKDIIRQGEDGMD |
| | | | | | | | | | VWGQGTTVTVSS |
| COV2- | Ab | SARS-CoV2 | SARS-CoV1 | SARS-CoV2 | | S; RBD | B-cells; SARS-CoV2 | 413 | QVQLVQSGAEVKKPGASVKVSCKASGY |
| 2391 | | | | | | | Human Patient | | TFGSFDINWVRQATGQGLEWMGRMN |
| | | | | | | | | | SNSGNTAYAQKFQGRVTMTRDTSTNTA |
| | | | | | | | | | YMELSSLRSEDTAMYYCARMRSGWPTH |
| | | | | | | | | | GRPDDFWGRGTLVTVSS |
| COV2- | Ab | SARS-CoV2 | SARS-CoV1 | | SARS-CoV1, | S; NTD | B-cells; SARS-CoV2 | 414 | EVQLVESGGGLVKPGGSLRLSCAASGFT |
| 2394 | | | | | SARS-CoV2 | | Human Patient | | FSGYSMNWVRQAPGKGLEWVSSISSSS |
| | | | | | | | | | SYIYYADSVKGRFTISRDNAKNSLYLQMN |
| | | | | | | | | | SLRAEDTAVYYCARWLQLRSDYYYFGM |
| | | | | | | | | | DVWGQGTTVTVSS |
| COV2- | Ab | SARS-CoV1, | | | SARS-CoV2 | S; non- | B-cells; SARS-CoV2 | 415 | EVQLVESGGGLVQPGGSLRLSCVASGFT |
| 2397 | | SARS-CoV2 | | | | RBD | Human Patient | | FSFYWMSWVRQAPGKGLEWVANIKQ |
| | | | | | | | | | DGGEKYYVDSVKGRFTISRDNAKNSLYL |
| | | | | | | | | | QMNSLRAEDTAVYYCARLSGSSWDFDY |
| | | | | | | | | | WGQGTLVTVSS |
| COV2- | Ab | SARS-CoV2 | SARS-CoV1 | | SARS-CoV1, | S; RBD | B-cells; SARS-CoV2 | 416 | EVQLVESGGGLVQPGGSLRLSCAASGFS |
| 2399 | | | | | SARS-CoV2 | | Human Patient | | VSTNYMSWVRQAPGKGLEWVSVIYSG |
| | | | | | | | | | GSTFYADSVKGRFTISRDNSKNTLYLQM |
| | | | | | | | | | NSLRAEDTAVYYCARDYRDWIWGQGTL |
| | | | | | | | | | VTVSS |
| COV2- | Ab | SARS-CoV2 | SARS-CoV1 | | SARS-CoV1, | S; non- | B-cells; SARS-CoV2 | 417 | QITLKESGPTLVKPTQTLTLTCTFSGFSL |
| 2400 | | | | | SARS-CoV2 | RBD | Human Patient | | STSGVGVGWIRQPPGKALEWLALIYWD |
| | | | | | | | | | DDKRYSPSLKSRLTITKDTSKNQVVLTMT |
| | | | | | | | | | NMDPVDTATYYCAHNRFQYCSSTTCYTL |
| | | | | | | | | | LPFDYWGQGTLVTVSS |
| COV2- | Ab | SARS-CoV1, | | | SARS-CoV2 | S; non- | B-cells; SARS-CoV2 | 418 | QVQLVESGGGVVQPGRSLRLSCAASGF |
| 2401 | | SARS-CoV2 | | | | RBD | Human Patient | | TFSSYALFWVRQAPGKGLEWVAVISYD |
| | | | | | | | | | GNNKYYADSVRGRFTISRDNSKNTLYLQ |
| | | | | | | | | | MNSLRPEDTAVYYCARPYTGSYKSYMD |
| | | | | | | | | | VWGKGTTVTVSS |
| COV2- | Ab | SARS-CoV1, | | | SARS-CoV2 | S; non- | B-cells; SARS-CoV2 | 419 | QVQLVESGGGVVQPGRSLRLSCAASGF |
| 2403 | | SARS-CoV2 | | | | RBD | Human Patient | | TFSSYAMHWVRQAPGKGLEWVAVISY |
| | | | | | | | | | DGSNKYYADSVKGRFTISRDNSKNTLYL |
| | | | | | | | | | QMSSLRAEDTAVFYCARGDGDVYNFLL |
| | | | | | | | | | VRNWFDPWGQGTLVTVSS |
| COV2- | Ab | SARS-CoV2 | SARS-CoV1 | | SARS-CoV1, | S; NTD | B-cells; SARS-CoV2 | 420 | QLQLQESGPGLVKPSETLSLTCTVSGGSI |
| 2405 | | | | | SARS-CoV2 | | Human Patient | | SSSSYYWGWIRQPPGKGLEWIGSFYYSG |
| | | | | | | | | | STYYNPSLKSRVTISVDTSKNQFSLNLSS |
| | | | | | | | | | VTAADTAVYSCASLWFGDLYSFDYWGQG |
| | | | | | | | | | TLVTVSS |
| COV2- | Ab | SARS-CoV1, | | | SARS-CoV2 | S; non- | B-cells; SARS-CoV2 | 421 | EVQLVESGGGLVQPGGSLRLSCADSAFT |
| 2406 | | SARS-CoV2 | | | | RBD | Human Patient | | FSSFWMSWVRQAPGKGLEWVANIKQ |
| | | | | | | | | | DGSEKFYLDSVKGRFTISRDNAKNSLYLQ |
| | | | | | | | | | MNSLRAEDTAVYYCARLGRSSWNFDY |
| | | | | | | | | | WGQGTLVTVSS |
| COV2- | Ab | SARS-CoV1, | | | SARS-CoV2 | S; non- | B-cells; SARS-CoV2 | 422 | QVQLQESGPGLVKPSQTLSLTCTVSGDSI |
| 2408 | | SARS-CoV2 | | | | RBD | Human Patient | | SSGSYYWSWIRQPAGKGLEWIGRIYTSG |
| | | | | | | | | | STTYNPSLKSRVTISVNTSKNQFSLNLSS |
| | | | | | | | | | VTAADTAVYYCARVGGISPYYYYYYMDV |
| | | | | | | | | | WGKGTTVTVSS |
| COV2- | Ab | SARS-CoV2 | SARS-CoV1 | SARS-CoV2 | | S; RBD | B-cells; SARS-CoV2 | 423 | QVQLVQSGAEVKKPGASVKVSCKASGY |
| 2413 | | | | (weak) | | | Human Patient | | TFTSYDINWVRQATGQGLEWMGWMN |
| | | | | | | | | | PNSGNAGYGQKFQGRVTMTRNTSISTA |
| | | | | | | | | | YMELSSLRSEDTAVYYCARMRSGWPTH |
| | | | | | | | | | GRPDDYWGRGTLVTVSS |
| COV2- | Ab | SARS-CoV2 | SARS-CoV1 | | SARS-CoV1, | S; RBD | B-cells; SARS-CoV2 | 424 | QVQLQESGPGLVKPSQTLSLTCTVSGGSI |
| 2416 | | | | | SARS-CoV2 | | Human Patient | | SSGGYYWSWIRQHPGKGLEWIGYIYYS |
| | | | | | | | | | GSTYYNPSLKSRVTISVDTSKNQFSLKLS |
| | | | | | | | | | SVTAADTAVYYCASAKLVATISYFDYWGQ |
| | | | | | | | | | GTLVTVSS |
| COV2- | Ab | SARS-CoV1, | | | SARS-CoV2 | S; RBD | B-cells; SARS-CoV2 | 425 | QVQLQQWGAGLLKPSETLSLTCAVYGG |
| 2417 | | SARS-CoV2 | | | | | Human Patient | | SFSGYYWNWLRQPPGKGLEWIGEINHS |
| | | | | | | | | | GSTNYNPSLKSRVTISVDTSKNQFSLKLS |
| | | | | | | | | | SVTAADTAVYYCARVGGYYYYYMDVWG |
| | | | | | | | | | KGTTVTVSS |
| COV2- | Ab | SARS-CoV2 | SARS-CoV1 | | SARS-CoV1, | S; non- | B-cells; SARS-CoV2 | 426 | EVRLLESGGGLVQPGGSLRLSCAASGFT |
| 2418 | | | | | SARS-CoV2 | RBD | Human Patient | | FSDYAMNWVRQAPGKGLEWVSAISAT |
| | | | | | | | | | GGSTFYADSVKGRFSISRDNSKNSLVLQ |
| | | | | | | | | | MNSLRAEDTAVYYCAKPYGMDVWGQ |
| | | | | | | | | | GTTVTVSS |
| COV2- | Ab | SARS-CoV2 | SARS-CoV1 | | SARS-CoV1, | S; non- | B-cells; SARS-CoV2 | 427 | QGQLVQSGGDVVQPGKSLRLSCAASGF |
| 2420 | | | | | SARS-CoV2 | RBD | Human Patient | | TFTNYAMHWVRQAPGKGLEWVAVISN |
| | | | | | | | | | DGSNEKYVDSVKGRFSLSRDNSKNTVYL |
| | | | | | | | | | DMHSLRPEDTAIYYCARDRSNLERLVMT |
| | | | | | | | | | FGGIIAGAFDIWGQGARVTVSS |
| COV2- | Ab | SARS-CoV1, | | | SARS-CoV2 | S; non- | B-cells; SARS-CoV2 | 428 | QVQLVESGGGVVQPGRSLRLSCAASGF |
| 2422 | | SARS-CoV2 | | | | RBD | Human Patient | | TFSSYAMYWVRQAPGKGLEWVAVISYD |
| | | | | | | | | | GINKYYADSVKGRFTISRDNSKNTLYLQ |
| | | | | | | | | | MNSLRAEDTAVYYCARVNSGSYYSYFDY |
| | | | | | | | | | WGQGTLVTVSS |
| COV2- | Ab | SARS-CoV2 | SARS-CoV1 | | SARS-CoV1, | S; non- | B-cells; SARS-CoV2 | 429 | QVQLQESGPGLVKPSGTLSLTCAVSGGS |
| 2427 | | | | | SARS-CoV2 | RBD | Human Patient | | ISSSNWWSWVRQPPGKGLEWIGEIYHS |
| | | | | | | | | | GSTNYNPSLKSRVTISVDKSKNQFSLKLN |
| | | | | | | | | | SVTAADTAVYYCASRWGDYFDSSGAYD |
| | | | | | | | | | SWGQGTLLTVSS |
| COV2- | Ab | SARS-CoV2 | SARS-CoV1 | | SARS-CoV1, | S; non- | B-cells; SARS-CoV2 | 430 | QVQLVESGGGVVQPGKSLRLSCAASGF |
| 2428 | | | | | SARS-CoV2 | RBD | Human Patient | | TFSSYGMHWVRQAPGKGLEWVAVIWY |
| | | | | | | | | | DGNNKFYVDSVKGRFTISRDNSKNTLY |
| | | | | | | | | | MEMNSLRAEDTAVYYCARKGPLWRFD |
| | | | | | | | | | YWGQGTLVTVSS |
| COV2- | Ab | SARS-CoV1, | | | SARS-CoV2 | S; non- | B-cells; SARS-CoV2 | 431 | EVQLVESGGGLIQPGGSLRLSCAASGFIV |
| 2429 | | SARS-CoV2 | | | | RBD | Human Patient | | SSNYMSWVRQAPGKGLEWVSVIYSGG |
| | | | | | | | | | STYYADSVKGRFTISRDNSKNTLYLQMN |
| | | | | | | | | | SLRAEDTAVYYCARESTQWGQGTLVTV |
| | | | | | | | | | SS |
| COV2- | Ab | SARS-CoV1, | | | SARS-CoV2 | S; non- | B-cells; SARS-CoV2 | 432 | QLQLQESGPGLVKPSETLSLTCTVSGGSI |
| 2430 | | SARS-CoV2 | | | | RBD | Human Patient | | SSSSYYWGWIRQPPGKGLEWIGSVYYIG |
| | | | | | | | | | STYYNPSLKSRVTMSVDTSKNQFSLKLSS |
| | | | | | | | | | VTAADTAVYYCARAPFQLLDKYYFFYYM |
| | | | | | | | | | DVWGKGTTVTVSS |
| COV2- | Ab | SARS-CoV2 | SARS-CoV1 | | SARS-CoV1, | S; RBD | B-cells; SARS-CoV2 | 433 | EVQLVESGGDLIQPGGSLRLSCAASGLT |
| 2434 | | | | | SARS-CoV2 | | Human Patient | | VSSNYMSWVRQAPGKGLEWVSIIYSGG |
| | | | | | | | | | STYYADSVKGRFSISRDNSNNTLYLQMN |
| | | | | | | | | | SLRAEDTAVYFCARHIPAWGYKWGQGT |
| | | | | | | | | | LVTVSS |
| COV2- | Ab | SARS-CoV2 | SARS-CoV1 | | SARS-CoV1, | S; NTD | B-cells; SARS-CoV2 | 434 | EVQLLESGGGLVQPGGSLRLSCAASGFT |
| 2438 | | | | | SARS-CoV2 | | Human Patient | | FTSYGMSWVRQAPGKGLEWVSAISISG |
| | | | | | | | | | GSTYYADSVKGRFTISRDNSKNTLYLQM |
| | | | | | | | | | NSLRAEDTAVYYCAKLLGSGITLDNDAF |
| | | | | | | | | | DIWGQGTMVTVSS |
| COV2- | Ab | SARS-CoV1, | | | SARS-CoV2 | S; non- | B-cells; SARS-CoV2 | 435 | QVQLVQSGAEVKKPGSSVKVSCKASGG |
| 2441 | | SARS-CoV2 | | | | RBD | Human Patient | | TFSSYAIIWVRQAPGQGLEWMGGIIPIF |
| | | | | | | | | | GTTNYAQKFQGRVTITADESTSTAYVELS |
| | | | | | | | | | SLRSEDTAVYYCARIGHFDSSGYYLDYW |
| | | | | | | | | | GQGTLVTVSS |
| COV2- | Ab | SARS-CoV2 | SARS-CoV1 | | SARS-CoV1, | S; NTD | B-cells; SARS-CoV2 | 436 | EVQLLESGGGLVQPGGSLRLSCAASGFT |
| 2444 | | | | | SARS-CoV2 | | Human Patient | | FTSYAMNWVRQAPGKGLEWVSAISVS |
| | | | | | | | | | GGSTYYADSVKGRFTISRDNSKNTLYLQ |
| | | | | | | | | | MNSLRAEDTAVYYCAKDFGSGIVGATG |
| | | | | | | | | | FDFWGQGTLVTVSS |
| COV2- | Ab | SARS-CoV2 | SARS-CoV1 | | SARS-CoV1, | S; non- | B-cells; SARS-CoV2 | 437 | EVQLVESGGGVVRPGGSLRLSCAASGFT |
| 2445 | | | | | SARS-CoV2 | RBD | Human Patient | | FDDYGMSWVRQAPGKGLEWVSAINW |
| | | | | | | | | | NGGSTGYADSVKGRFTISRDNAKNSLYL |
| | | | | | | | | | QMNSLRAEDTALYHCARRRSSSRYSSG |
| | | | | | | | | | WYMYYYYMDVWGKGTTVTVSS |
| COV2- | Ab | SARS-CoV2 | SARS-CoV1 | | SARS-CoV1, | S; non- | B-cells; SARS-CoV2 | 438 | EVQLVQSGAEVKKPGESLKISCKGSGYSF |
| 2446 | | | | | SARS-CoV2 | RBD | Human Patient | | TNSWIGWVRQMPGKGLEWMGIIYPG |
| | | | | | | | | | DSDTRYSPSFQGQVTISADKSISTAYLQW |
| | | | | | | | | | SSLKASDTAIYYCATHRCSGGFCYLAYWG |
| | | | | | | | | | QGTLVTVSS |
| COV2- | Ab | SARS-CoV1, | | | SARS-CoV2 | S; non- | B-cells; SARS-CoV2 | 439 | QVQLVESGGGVVQPGRSLRLSCATSGFT |
| 2449 | | SARS-CoV2 | | | | RBD | Human Patient | | FSSFALHWVRQAPGKGLEWVTVISDDG |
| | | | | | | | | | NNKYYVDSVKGRFTISRDNSKNTLFLQM |
| | | | | | | | | | NSLRVEDTAIYYCARASYNSNWSIGEYFR |
| | | | | | | | | | DWGQGTLVTVSS |
| COV2- | Ab | SARS-CoV1, | | | SARS-CoV2 | S; RBD | B-cells; SARS-CoV2 | 440 | QVQLVESGGGVVQPGRSLRLSCAASGF |
| 2450 | | SARS-CoV2 | | | | | Human Patient | | TFSTYGMHWVRQAPGKGLEWVAVILY |
| | | | | | | | | | DGSNRYYADSVKGRFTISRDNSKNTLYL |
| | | | | | | | | | QMNSLRAEDTAVYYCAKQGGLYCSGTN |
| | | | | | | | | | CWGGYLDYWGQGTLVTVSS |
| COV2- | Ab | SARS-CoV2 | SARS-CoV1 | | SARS-CoV1, | S; non- | B-cells; SARS-CoV2 | 441 | QITLKESGPTLVKPTQTLTLTCTVSGFSL |
| 2451 | | | | | SARS-CoV2 | RBD | Human Patient | | STSGVGVGCIRQPPGKALEWLALIYWDD |
| | | | | | | | | | DKRYSPSLKSRLTITRDTSKNQVVLTMTN |
| | | | | | | | | | MDPVDTGTYFCVHRHVSGAFDYWGQG |
| | | | | | | | | | TLVTVSS |
| COV2- | Ab | SARS-CoV1, | | | SARS-CoV2 | S; non- | B-cells; SARS-CoV2 | 442 | QVQLVQSGSELKKPGASVKVSCKASGYT |
| 2453 | | SARS-CoV2 | | | | RBD | Human Patient | | FTSYAMNWVRQAPGQGLEWMGWINT |
| | | | | | | | | | NTGNPTYAQGFTGRFVFSLDTSVNTAYL |
| | | | | | | | | | QISSLKAEDTAVYYCARARLLGYCSSTSC |
| | | | | | | | | | YTIGWGAFDIWGQGTMVTVSS |
| COV2- | Ab | SARS-CoV2 | SARS-CoV1 | | SARS-CoV1, | S; non- | B-cells; SARS-CoV2 | 443 | QVQLVESGGGVVQPGRSLRLSCAASGF |
| 2454 | | | | | SARS-CoV2 | RBD | Human Patient | | TFSSYGMHWVRQAPGKGLEWVAVIWY |
| | | | | | | | | | DGSNKYYADSVKGRFTISRDNSKNTLYL |
| | | | | | | | | | QMNSLRAEDTAVYYCAREGQGTYLDY |
| | | | | | | | | | WGQGTLVTVSS |
| COV2- | Ab | SARS-CoV2 | SARS-CoV1 | | SARS-CoV1, | S; NTD | B-cells; SARS-CoV2 | 444 | EVQLVESGGGLVQPGGSLRLSCAASGFT |
| 2455 | | | | | SARS-CoV2 | | Human Patient | | FSSYEMNWVRQAPGKGLEWVSYISSSG |
| | | | | | | | | | SAIYYADSVKGRFTISRDNAKNSLYLQM |
| | | | | | | | | | NSLRVEDTAVYYCAREARSRYFDWLPSY |
| | | | | | | | | | YFDYWGQGTLVTVSS |
| COV2- | Ab | SARS-CoV1, | | | SARS-CoV2 | S; non- | B-cells; SARS-CoV2 | 445 | QVQLVESGGGVVQPGRSLRLSCAASGF |
| 2458 | | SARS-CoV2 | | | | RBD | Human Patient | | TFSRHAMHWVRQAPGKGLEWVAVISY |
| | | | | | | | | | DGSNKYYADSVKGRFAISRDNSKNTLYL |
| | | | | | | | | | QMNSLRPEDTAVYYCARDPSPLVLITSID |
| | | | | | | | | | YWGQGTLVTVSS |
| COV2- | Ab | SARS-CoV2 | SARS-CoV1 | | SARS-CoV1, | S; NTD | B-cells; SARS-CoV2 | 446 | QLQLQESGPGLVKPSETLSLTCTVSGGSI |
| 2459 | | | | | SARS-CoV2 | | Human Patient | | SSGTYYCGWIRQPPGKGLEWIGSTYYG |
| | | | | | | | | | GSTLYNPSLRGRVTISVDTSKNQFSLKLS |
| | | | | | | | | | SVTAADTAVYYCARRGNYYDSKNWFDP |
| | | | | | | | | | WGQGTLVTVSS |
| COV2- | Ab | SARS-CoV1, | | | SARS-CoV2 | S; RBD | B-cells; SARS-CoV2 | 447 | QVQLQESGPGLVKPSQTLSLTCTVSGGSI |
| 2461 | | SARS-CoV2 | | | | | Human Patient | | SSGGYFWSWIRQHPGKGLEWIGSIYYS |
| | | | | | | | | | GSTYYNPSLRSRITISVDTSKNQFSLKLS |
| | | | | | | | | | SVTAADTAVYYCARGGSGSYSLFDYWGQ |
| | | | | | | | | | GTLVTVSS |
| COV2- | Ab | SARS-CoV1, | | | SARS-CoV2 | S; RBD | B-cells; SARS-CoV2 | 448 | EVQLVESGGGLVQPGGSLRLSCAASGFT |
| 2462 | | SARS-CoV2 | | | | | Human Patient | | FSSSDLHWVRQATGKGLEWVSAIGTAG |
| | | | | | | | | | DTYYLGSVKGRFTISRENGKNSLYLQMN |
| | | | | | | | | | SLRAGDTAVYYCARVLYDSSGFYNWFDP |
| | | | | | | | | | WGQGTLVTVSS |
| COV2- | Ab | SARS-CoV1, | | | SARS-CoV2 | S; RBD | B-cells; SARS-CoV2 | 449 | QVQLQESGPGLVKPSQTLSLTCTVSGGSI |
| 2464 | | SARS-CoV2 | | | | | Human Patient | | SSGGYYWSWIRQHPGKGLEWIGYISYS |
| | | | | | | | | | GSTYYNPSLKSRLTISVDTSKNQFSLKLS |
| | | | | | | | | | SVTAADTAVYYCARDLGDGYNLRVPAYF |
| | | | | | | | | | DLWGRGTLVTVSS |
| COV2- | Ab | SARS-CoV1, | | | SARS-CoV2 | S; RBD | B-cells; SARS-CoV2 | 450 | QVQLQESGPGLVKPSGTLSLTCAVSGGS |
| 2465 | | SARS-CoV2 | | | | | Human Patient | | ISSSNWWSWVRQPPGKGLEWIGEIYHG |
| | | | | | | | | | GSTDYNPSLKSRVTISVDKSKNQFSLKLT |
| | | | | | | | | | SVTAADTAVYYCARVDHVNVRDYWGPG |
| | | | | | | | | | TLVTVSS |
| COV2- | Ab | SARS-CoV2 | SARS-CoV1 | | SARS-CoV1, | S; NTD | B-cells; SARS-CoV2 | 451 | EVQLVESGGGLVKPGGSLRLSCAASGFT |
| 2466 | | | | | SARS-CoV2 | | Human Patient | | FSSYSMNWVRQAPGKGLEWVSSISNSN |
| | | | | | | | | | SFIYYADSMKGRFTISRDNAKNSLYLQM |
| | | | | | | | | | NSLRAEDTAVYYCARVNGNSNWNFGSY |
| | | | | | | | | | YYYYMDVWGKGTTVTVSS |
| COV2- | Ab | SARS-CoV2 | SARS-CoV1 | | SARS-CoV1, | S; non- | B-cells; SARS-CoV2 | 452 | QVQLVESGGGVVQPGRSLRLSCAASGF |
| 2473 | | | | | SARS-CoV2 | RBD | Human Patient | | TFSNYGMHWVRQAPGKGLEWVAVIYY |
| | | | | | | | | | DGSNKYYADSVKGRFTISRDNSKNTLYL |
| | | | | | | | | | QIHSLRAEDTAVYYCAREGQMAATTGID |
| | | | | | | | | | YWGQGTLVTVSS |
| COV2- | Ab | SARS-CoV2 | SARS-CoV1 | | SARS-CoV1, | S; non- | B-cells; SARS-CoV2 | 453 | EVQLVESGGGLVKPGGSLRLSCAASGFT |
| 2474 | | | | | SARS-CoV2 | RBD | Human Patient | | FSNAWMSWVRQAPGKGLEWVGRIKG |
| | | | | | | | | | KTDGGTTDYAAPVKGRFTISKDDSKNTL |
| | | | | | | | | | YLQMSSLNTEDTAVYWCTTLTYYYDSSA |
| | | | | | | | | | YLNDAFDIWGQGTMVTVSS |
| COV2- | Ab | SARS-CoV1, | | | SARS-CoV2 | S; non- | B-cells; SARS-CoV2 | 454 | EVQLVESGGGLVQPGRSLRLSCAASGFT |
| 2478 | | SARS-CoV2 | | | | RBD | Human Patient | | FDDYAMHWVRQAPGKGLEWVSGISW |
| | | | | | | | | | NSDNIGYADSVKGRFTISRDIAKNSLYLQ |
| | | | | | | | | | MNSLRAEDTALYYCAKGIYYDIFMPLLD |
| | | | | | | | | | WGRGTLVTVSS |
| COV2- | Ab | SARS-CoV2 | SARS-CoV1 | SARS-CoV2 | | S; RBD | B-cells; SARS-CoV2 | 455 | QVQLVQSGAEVKKPGSSVKVSCKTSGD |
| 2479 | | | | | | | Human Patient | | TSSSYTVGWVRQAPGQGLEWMGRIIPI |
| | | | | | | | | | LGIAYSAQKFQGRLTITADKSTSTSYMEL |
| | | | | | | | | | SSLRSEDTAVYYCARGVVAATPGWFDP |
| | | | | | | | | | WGQGTLVTVSS |
| COV2- | Ab | SARS-CoV1, | | | SARS-CoV2 | S; non- | B-cells; SARS-CoV2 | 456 | QVQLVQSGAEVKKPGSSVKVSCKASGG |
| 2481 | | SARS-CoV2 | | | | RBD | Human Patient | | TFGSYVISWVRQAPGQGLQWMGGIIPI |
| | | | | | | | | | FGKPNYAQKFQGRVTITADESTSTAYME |
| | | | | | | | | | LSSLRSEDTAVYYCARGWFGELLKGTYW |
| | | | | | | | | | FDPWGQGTLVTVSS |
| COV2- | Ab | SARS-CoV2 | SARS-CoV1 | SARS-CoV2 | | S; RBD | B-cells; SARS-CoV2 | 457 | QVQLVQSGAEVKKPGSSVKVSCKASGG |
| 2485 | | | | (weak) | | | Human Patient | | TFSSYSITWVRQAPGQGLEWMGRIIPVL |
| | | | | | | | | | GIANYAQKFQDRVTITADKSTSTAYMEL |
| | | | | | | | | | SSLRSEDTAVYYCARVGVSGFKSGSNWY |
| | | | | | | | | | FDLWGRGTLVTVSS |
| COV2- | Ab | SARS-CoV2 | SARS-CoV1 | | SARS-CoV1, | S; non- | B-cells; SARS-CoV2 | 458 | EVQLVESGGGLVQPGGSLRLSCAVSGFT |
| 2488 | | | | | SARS-CoV2 | RBD | Human Patient | | FSSYWMHWVRQAPGKGLVWVSRINSD |
| | | | | | | | | | GSSTSYADSVKGRFTISRDNAKNTLYLQ |
| | | | | | | | | | MNSLRAEDTAVYYCAREVEQLAHMVDY |
| | | | | | | | | | WGQGTLVTVSS |
| COV2- | Ab | SARS-CoV2 | SARS-CoV1 | SARS-CoV2 | | S; NTD | B-cells; SARS-CoV2 | 459 | QLQLQESGPGLVKPSETLSLTCTVSGGSI |
| 2489 | | | | (weak) | | | Human Patient | | SSTTYYWGWIRQPPGKGLEWIASIYYSG |
| | | | | | | | | | STYYNPSLKSRLTVSVDTSKNQFSLKLSS |
| | | | | | | | | | VTAADTAVYYCARQWKWFGEAWYFDL |
| | | | | | | | | | WGRGTLVTVSS |
| COV2- | Ab | SARS-CoV2 | SARS-CoV1 | | SARS-CoV1, | S; NTD | B-cells; SARS-CoV2 | 460 | EVQLVESGGGLVQPGGSLRLSCAASGFT |
| 2490 | | | | | SARS-CoV2 | | Human Patient | | FSSYWMNWVRQAPGKGLEWVANINQ |
| | | | | | | | | | DGGEKYYVDSVRGRFTISRDNAKNSLYL |
| | | | | | | | | | QMNSLRAEDTAVYYCARDPYDLYGDYG |
| | | | | | | | | | GTFDYWGQGTLVTVSS |
| COV2- | Ab | SARS-CoV2 | SARS-CoV1 | | SARS-CoV1, | S; NTD | B-cells; SARS-CoV2 | 461 | QVQLVQSGAAVKKPGSSVKVSCKASGG |
| 2495 | | | | | SARS-CoV2 | | Human Patient | | TFSSYAISWVRQAPGQGLEWMGGIVPI |
| | | | | | | | | | FGTANYAQKFQGRVTITADESTTTAYME |
| | | | | | | | | | LNSLRSEDTAVYYCAREDYYGSGSLVDPY |
| | | | | | | | | | YYYRMDVWGQGTTVTVSS |
| COV2- | Ab | SARS-CoV2 | SARS-CoV1 | | SARS-CoV1, | S; non- | B-cells; SARS-CoV2 | 462 | QVQLVESGGGVVQPGRSLRLSCAASGF |
| 2496 | | | | | SARS-CoV2 | RBD | Human Patient | | TFSNYGMHWVRQAPGKGLEWVAVIW |
| | | | | | | | | | YDGSNKYYADSVKGRFTISRDNSKNTLYL |
| | | | | | | | | | QMNSLRAEDTAVYYCVRDLALFEVVIQ |
| | | | | | | | | | QGVWGQGTLVTVSS |
| COV2- | Ab | SARS-CoV2 | SARS-CoV1 | SARS-CoV2 | | S; RBD | B-cells; SARS-CoV2 | 463 | QLQLQESGPGLVKPSETLSLTCTVSGGSV |
| 2499 | | | | | | | Human Patient | | SSRSYYWGWIRQPPGKGLEWIGSIYYSG |
| | | | | | | | | | STYYNPSLKSRVTISVDTSKNQFSLKLSS |
| | | | | | | | | | VTAADTAVYYCARHTVDCGGDCFPNDAF |
| | | | | | | | | | DIWGQGTMVTVSS |
| COV2- | Ab | SARS-CoV2 | SARS-CoV1 | SARS-CoV2 | | S; RBD | B-cells; SARS-CoV2 | 464 | QVQLVQSGAEVKKPGASVKVSCKASGY |
| 2504 | | | | | | | Human Patient | | TFTDYYMHWVRQAPGQGLEWMGWI |
| | | | | | | | | | NPNSRGTNYAQKFQGRVTMTRDTSIST |
| | | | | | | | | | VYMELSRLTSDDTAVYYCARVVVLGYGR |
| | | | | | | | | | PNNYYDGRNVWDYWGQGTLVTVSS |
| COV2- | Ab | SARS-CoV1, | | | SARS-CoV2 | S; non- | B-cells; SARS-CoV2 | 465 | QVQLVESGGGVVQPGRSLRLSCAASGFI |
| 2509 | | SARS-CoV2 | | | | RBD | Human Patient | | FSTYAMHWVRQAPGKGLEWVAVISYD |
| | | | | | | | | | GDNKYYADSVKGRFTISRDNSKNTLYLE |
| | | | | | | | | | MNSLRAEDTAVYYCARPRGGSYQTCFD |
| | | | | | | | | | YWGQGTLVTVSS |
| COV2- | Ab | SARS-CoV2 | SARS-CoV1 | | SARS-CoV1, | S; RBD | B-cells; SARS-CoV2 | 466 | QVQLVQSGSELKKPGASVKVSCKASGYT |
| 2510 | | | | | SARS-CoV2 | | Human Patient | | FTSHTMNWVRQAPGQGLEWMGWIN |
| | | | | | | | | | TNTGNPMYAQGFTGRFVFSLDTSGSTA |
| | | | | | | | | | YLQISSLKAEDTAVYYCARWGPDYGDYA |
| | | | | | | | | | SNDYWGQGTLVTVSS |
| COV2- | Ab | SARS-CoV1, | | SARS-CoV2 | | S; RBD | B-cells; SARS-CoV2 | 467 | EVQLVESGGGVVRPGGSLRLSCAASGFI |
| 2514 | | SARS-CoV2 | | (weak) | | | Human Patient | | FDDYDMTWVRQAPGKGLEWVSGINW |
| | | | | | | | | | NGGSTGYADSVKGRFTISRDNAKNSLYL |
| | | | | | | | | | QMNSLRAEDTALYHCAVIMSPIPRYSGY |
| | | | | | | | | | DWAGDAFDIWGQGTMVTVSS |
| COV2- | Ab | SARS-CoV1, | | | SARS-CoV2 | S; non- | B-cells; SARS-CoV2 | 468 | QVQLVQSGSELKKPGASVKVSCKASGYT |
| 2515 | | SARS-CoV2 | | | | RBD | Human Patient | | FTTYAMNWVRQAPGQGLEWMGWIN |
| | | | | | | | | | TNTGNPTYAQDFTGRFVFSLDTSVSTAYL |
| | | | | | | | | | QISSLKAEDTAVYYCARGLVGRIDPWGQ |
| | | | | | | | | | GTLVTVSS |
| COV2- | Ab | SARS-CoV1, | | | SARS-CoV2 | S; RBD | B-cells; SARS-CoV2 | 469 | QVQLVQSGAEVKKPGASVKVSCKASGY |
| 2516 | | SARS-CoV2 | | | | | Human Patient | | TFTNYYMHWVRQAPGQGLEWMGILN |
| | | | | | | | | | PGAGSTSYAQKFQGRVTMTSDTSTNTV |
| | | | | | | | | | YMQLSSLKSEDTAVYYCARDQQIVPHAD |
| | | | | | | | | | GFDIWGQGTMVTVSS |
| COV2- | Ab | SARS-CoV1, | | | SARS-CoV2 | S; non- | B-cells; SARS-CoV2 | 470 | QVQLVQSGAEVRKPGSSVKVSCKASGG |
| 2517 | | SARS-CoV2 | | | | RBD | Human Patient | | TFSSYAISWVRQAPGQGLEWMGGIIPV |
| | | | | | | | | | FGTANYAQKFQGRVTITADKSTSTAFME |
| | | | | | | | | | LNSLRSEDTAVYYCARIGSYPEYFQHWG |
| | | | | | | | | | QGTLVTVSS |
| COV2- | Ab | SARS-CoV2 | SARS-CoV1 | | SARS-CoV1, | S; RBD | B-cells; SARS-CoV2 | 471 | EVQLVESGGGLVQPGRSLRLSCAASGFT |
| 2518 | | | | | SARS-CoV2 | | Human Patient | | FDDYAMHWVRQAPGKGLEWVSGISW |
| | | | | | | | | | NSGTIGYADSVKGRFIISRDNAKNSLYLQ |
| | | | | | | | | | MNSLRPEDTALYYCAKDIIRQGEDGMD |
| | | | | | | | | | VWGQGTTVTVSS |
| COV2- | Ab | SARS-CoV1, | | | SARS-CoV2 | S; non- | B-cells; SARS-CoV2 | 472 | EVQLVESGGGLVQPGGSLRLSCAASGFT |
| 2520 | | SARS-CoV2 | | | | RBD | Human Patient | | FSSYWMSWVRQAPGKGLEWVANIKED |
| | | | | | | | | | GSEKYYVDSVKGRFTISRDNAKNSLYLQ |
| | | | | | | | | | MNSLRAEDTAVYYCARDVGGYSGYDLG |
| | | | | | | | | | FDYYYYMDVWGKGTTVTVSS |
| COV2- | Ab | SARS-CoV2 | SARS-CoV1 | | SARS-CoV1, | S; non- | B-cells; SARS-CoV2 | 473 | QVQLVESGGGVVQPGRSLRLACAASGF |
| 2521 | | | | | SARS-CoV2 | RBD | Human Patient | | TFSSYGMHWVRQAPGKGLEWVAVISY |
| | | | | | | | | | DGNNKYYADSLKGRFTISRDDSKNTLYL |
| | | | | | | | | | QMNSLRAEDTAVYYCAKDRTAVFLFFGL |
| | | | | | | | | | GDAFDIWGQGTMVTVSS |
| COV2- | Ab | SARS-CoV1, | | | SARS-CoV2 | S; non- | B-cells; SARS-CoV2 | 474 | EVQLVQSGAEVKKPGESLKISCKGSGYSF |
| 2524 | | SARS-CoV2 | | | | RBD | Human Patient | | TSHWIGWVRQMPGKGLEWMGIIYPG |
| | | | | | | | | | DSDTRYSPSFQGQVTISADKSISTAYLQW |
| | | | | | | | | | SSLKASDTAMYYCASALRERGVQLWSV |
| | | | | | | | | | WGQGTLVTVSS |
| COV2- | Ab | SARS-CoV2 | SARS-CoV1 | | SARS-CoV1, | S; NTD | B-cells; SARS-CoV2 | 475 | EVRLLESGGGLVQPGGSLRLSCAASGFT |
| 2525 | | | | | SARS-CoV2 | | Human Patient | | FTSYAMSWVRQAPGKGLQWVSTISVSG |
| | | | | | | | | | GSTYYADSVKGRFTISRDNSKNTLYLQM |
| | | | | | | | | | NSLRAEDTAVYYCAKDPASGIVGPTHFD |
| | | | | | | | | | YWGQGTLVTVSS |
| COV2- | Ab | SARS-CoV2 | SARS-CoV1 | | SARS-CoV1, | S; NTD | B-cells; SARS-CoV2 | 476 | QVQLVQSGAEVKKPGASVKVSCKVSGY |
| 2526 | | | | | SARS-CoV2 | | Human Patient | | TLTELSIHWVRQAPGKGLEWMGGFDP |
| | | | | | | | | | EDAETIYAQQFQGRVTMTEDTSTDTAY |
| | | | | | | | | | MELSSLKSEDTALYYCATGFAVFGRAAV |
| | | | | | | | | | PYWGQGTLVTVSS |
| COV2- | Ab | SARS-CoV2 | SARS-CoV1 | | SARS-CoV1, | S; RBD | B-cells; SARS-CoV2 | 477 | QVQLQESGPGLVKPSQTLSLTCTVSGGSI |
| 2527 | | | | | SARS-CoV2 | | Human Patient | | SSGDYYWSWIRQPPGKGLEWIGYIYYSG |
| | | | | | | | | | STYYNPSLKSRVTISVDTSKNQVSLKLSS |
| | | | | | | | | | VTAADTAVYYCARFRRSYGSGSYYNISFD |
| | | | | | | | | | YWGQGTLVTVSS |
| COV2- | Ab | SARS-CoV2 | SARS-CoV1 | | SARS-CoV1, | S; non- | B-cells; SARS-CoV2 | 478 | QVQLVQSGSELKKPGASVKVSCKASGYT |
| 2529 | | | | | SARS-CoV2 | RBD | Human Patient | | FTRHAMNWVRQAPGQGLEWMGWIN |
| | | | | | | | | | TNTGNPTYAQGFTGRFVFSLDTSVSTAY |
| | | | | | | | | | LQISSLKAEDTAVYYCVREYGSGHPLPIW |
| | | | | | | | | | GQGTLVTVSS |
| COV2- | Ab | SARS-CoV2 | SARS-CoV1 | SARS-CoV2 | | S; RBD | B-cells; SARS-CoV2 | 479 | QVQLQESGPGLVKPSETLSLTCSVSGGSI |
| 2531 | | | | | | | Human Patient | | RSYFWNWVRQPPGKGLEWIGYIYYSGS |
| | | | | | | | | | TNYKPSFKSRVTISLDTSKNQISLKLSSV |
| | | | | | | | | | TAADTAVYYCARATWLRDAFGIWGQGT |
| | | | | | | | | | MVTVSS |
| COV2- | Ab | SARS-CoV2 | SARS-CoV1 | | SARS-CoV1, | S; RBD | B-cells; SARS-CoV2 | 480 | QVQLVQSGAEVKKPGASVRVSCKAPGY |
| 2532 | | | | | SARS-CoV2 | | Human Patient | | TFTTYYIHWVRQAPGQGLEWMGIINPS |
| | | | | | | | | | AGSTTYAQKFQGRVTMTRDTSTSTVYM |
| | | | | | | | | | ELSSLRSEDTAVYYCARGFHVPAALRNW |
| | | | | | | | | | FDPWGQGTLVTVSS |
| COV2- | Ab | SARS-CoV2 | SARS-CoV1 | | SARS-CoV1, | S; NTD | B-cells; SARS-CoV2 | 481 | QVQLQESGPGLVKPSQTLSLTCTVSGGSI |
| 2533 | | | | | SARS-CoV2 | | Human Patient | | SSGGYYWSWIRQHPGKGLEWIGYIYYS |
| | | | | | | | | | GSTYYNPSLKSRVTISVDTSKNQFSLKLT |
| | | | | | | | | | SVTAADTAVYYCAREANDSGSFYNGPFDY |
| | | | | | | | | | WGQGTLVTVSS |
| COV2- | Ab | SARS-CoV1, | | | SARS-CoV2 | S; non- | B-cells; SARS-CoV2 | 482 | QVQLQESGPGLVKPSQTLSLTCTVSGGSI |
| 2536 | | SARS-CoV2 | | | | RBD | Human Patient | | SSGSYYWSWIRQPAGKGLEWIGRIFTSG |
| | | | | | | | | | STNYNPSLKSRVTISVDTSKNQFSLKLSS |
| | | | | | | | | | VTAADTAVYYCARGGLLWFGGAGNYMD |
| | | | | | | | | | VWGKGTTVTVSS |
| COV2- | Ab | SARS-CoV2 | SARS-CoV1 | SARS-CoV2 | | S; RBD | B-cells; SARS-CoV2 | 483 | QVQLAQSGAEVKKPGASVKVSCKAGGY |
| 2539 | | | | | | | Human Patient | | TFTSYDINWVRQATGQGLEWMGWMN |
| | | | | | | | | | SNSGNAGYAQKFQGRVTMTRDTSISTA |
| | | | | | | | | | YMELSSLRSEDTAVYYCARMRTGWPTH |
| | | | | | | | | | GRPDDFWGRGTLVTVSS |
| COV2- | Ab | SARS-CoV2 | SARS-CoV1 | | SARS-CoV1, | S; non- | B-cells; SARS-CoV2 | 484 | QVQIQQWGAGVLKPSETLSLTCAVYGG |
| 2545 | | | | | SARS-CoV2 | RBD | Human Patient | | SFSGHYWSWIRQPPGKGLEWIGEINHS |
| | | | | | | | | | GSTKYNPSLKSRVTISVDTSKNQFSLKLS |
| | | | | | | | | | SVTAADTAVYYCARGPPVTTFFVFSLLFD |
| | | | | | | | | | PWGQGTLVTVSS |
| COV2- | Ab | SARS-CoV2 | SARS-CoV1 | | SARS-CoV1, | S; non- | B-cells; SARS-CoV2 | 485 | QVQLVESGGGVVQPGRSLRLSCAASGF |
| 2546 | | | | | SARS-CoV2 | RBD | Human Patient | | TFSSYGMHWVRQAPGKGLEWVAVISY |
| | | | | | | | | | DGRNKYYADSVKGRFTISRDNSKNTLYL |
| | | | | | | | | | QMSSLRAEDTAVYYCAKEGEWELRGNA |
| | | | | | | | | | LDIWGQGTMVTVSS |
| COV2- | Ab | SARS-CoV2 | SARS-CoV1 | | SARS-CoV1, | S; non- | B-cells; SARS-CoV2 | 486 | QVQLVESGGGVVQPGRSLRLSCAASGF |
| 2549 | | | | | SARS-CoV2 | RBD | Human Patient | | TFSSYGMHWVRQAPDKGLEWVAVIWY |
| | | | | | | | | | DGSNKYYADSVKGRFTISRDNSKNTLYL |
| | | | | | | | | | QMNSLRAEDTAVYYCAREGQWPNQAF |
| | | | | | | | | | DIWGQGTMVTVSS |
| COV2- | Ab | SARS-CoV1, | | | SARS-CoV2 | S; non- | B-cells; SARS-CoV2 | 487 | QVQLQESGPGLVKPSETLSLTCTVSGGSI |
| 2551 | | SARS-CoV2 | | | | RBD | Human Patient | | SSSSYYWGWIRQPPGKGLEWIGSIYYSG |
| | | | | | | | | | SSYYSPSLKSRVTISADTSKNQFSLNLRS |
| | | | | | | | | | VTAADTAVYYCASGPPYMATFSYYFDYW |
| | | | | | | | | | GQGTLVTVSS |
| COV2- | Ab | SARS-CoV1, | | SARS-CoV2 | | S; RBD | B-cells; SARS-CoV2 | 488 | QVQLVESGGGLVKPGGSLRLSCAASGFT |
| 2552 | | SARS-CoV2 | | (weak) | | | Human Patient | | FSDYYMSWIRQAPGKGLECVSYISSSGST |
| | | | | | | | | | IYYADSVKGRFTISRDNAKNSLYLQMNSL |
| | | | | | | | | | RAEDTAVYYCARDPIRDGVWGLNENDY |
| | | | | | | | | | WGQGTLVTVSS |
| COV2- | Ab | SARS-CoV2 | SARS-CoV1 | | SARS-CoV1, | S; non- | B-cells; SARS-CoV2 | 489 | QVQLVESGGGVVQPGRSLRLSCAASGFI |
| 2553 | | | | | SARS-CoV2 | RBD | Human Patient | | FSSYAMHWVRQAPGKGLEWVAVISYD |
| | | | | | | | | | GSNKYYADSVKGRFTISRDNSKNTLYLQ |
| | | | | | | | | | MNSLRAEDTAVYYCARSPPASYYNPSTG |
| | | | | | | | | | YFDYWGQGTLVTVSS |
| COV2- | Ab | SARS-CoV1, | | | SARS-CoV2 | S; RBD | B-cells; SARS-CoV2 | 490 | QVQLVQSGAEVKKPGASVKVSCKASGY |
| 2554 | | SARS-CoV2 | | | | | Human Patient | | TFTSHYMHWVRQAPGQGLEWMGIINP |
| | | | | | | | | | SGGSTSYAQKFQGRVTMTSDTSTSTVY |
| | | | | | | | | | MELSSLRSEDTAMYYCARDVFWVPAAS |
| | | | | | | | | | SFDYWGQGTLVTVSS |
| COV2- | Ab | SARS-CoV2 | SARS-CoV1 | | SARS-CoV1, | S; NTD | B-cells; SARS-CoV2 | 491 | QVQLVESGGGVVQPGRSLRLSCAASGF |
| 2558 | | | | | SARS-CoV2 | | Human Patient | | TFSSYAMHWVRQAPGKGLEWVAVISY |
| | | | | | | | | | DGSNKYYADSVKGRFTISRDNSKNTLYL |
| | | | | | | | | | QMNSLRVEDTAVYYCARDQEWFRELFL |
| | | | | | | | | | FDYWGQGTLVTVSS |
| COV2- | Ab | SARS-CoV2 | SARS-CoV1 | SARS-CoV2 | | S; RBD | B-cells; SARS-CoV2 | 492 | QVQLAQSGAEVKKPGASVKVSCKAAGY |
| 2562 | | | | | | | Human Patient | | TFTSYDINWVRQATGQGLEWMGWMN |
| | | | | | | | | | SNSGNAGYAQKFQGRVTMTRDTSTSTA |
| | | | | | | | | | YMELSSLTSDDTAVYYCARMRTGWPTH |
| | | | | | | | | | GRPDDFWGRGTLVTVSS |
| COV2- | Ab | SARS-CoV2 | SARS-CoV1 | | SARS-CoV1, | S; NTD | B-cells; SARS-CoV2 | 493 | QVQLQQWGAGLLKPSETLSLTCAVYGG |
| 2563 | | | | | SARS-CoV2 | | Human Patient | | SFSGYYWSWIRQPPGKGLEWIGEINHS |
| | | | | | | | | | GSSNYNPSLKSRVTISVDTSKNQFSLKLS |
| | | | | | | | | | SVTAADTAVYYCARGWGWGAVAGRAEY |
| | | | | | | | | | YFDYWGQGTLVTVSS |
| COV2- | Ab | SARS-CoV1, | | | SARS-CoV2 | S; non- | B-cells; SARS-CoV2 | 494 | QVQLVESGGGVVQPGRSLRLSCAASGF |
| 2564 | | SARS-CoV2 | | | | RBD | Human Patient | | TFSSYAMHWVRQAPGKGLEWVAVISY |
| | | | | | | | | | DGYNKYYADSVKGRFTISRDNSKNTLYL |
| | | | | | | | | | QMNSLRAEDTAVYYCARAQGGNYYYG |
| | | | | | | | | | MDVWGQGTTVTVSS |
| COV2- | Ab | SARS-CoV1, | | | SARS-CoV2 | S; non- | B-cells; SARS-CoV2 | 495 | QVQLQESGPGLVKPSQTLSLTCTVSGGSI |
| 2565 | | SARS-CoV2 | | | | RBD | Human Patient | | SSGSYYWSWIRQPAGKGLEWIGRVYIYS |
| | | | | | | | | | SGSTNYNPSLKSRVTISVDTSKNQFSLKL |
| | | | | | | | | | SSVTAADTAVYYCARGAASFDYWGQGTL |
| | | | | | | | | | VTVSS |
| COV2- | Ab | SARS-CoV2 | SARS-CoV1 | | SARS-CoV1, | S; non- | B-cells; SARS-CoV2 | 496 | QLQLQESGPGLVKPSETLSLTCTVSGGSI |
| 2570 | | | | | SARS-CoV2 | RBD | Human Patient | | SSSSNYWGWIRQPPGKGLEWIGSIYYSG |
| | | | | | | | | | STYYNPSLKSRVTISVDTSKNQFSLKLSS |
| | | | | | | | | | VTAADTAVYYCARDPRVVVTARMYNWF |
| | | | | | | | | | DPWGQGTLVTVSS |
| COV2- | Ab | SARS-CoV2 | SARS-CoV1 | | SARS-CoV1, | S; NTD | B-cells; SARS-CoV2 | 497 | QVQLQESGPGLVKPSETLSLTCTVSGGSL |
| 2571 | | | | | SARS-CoV2 | | Human Patient | | SSYYWSWIRQPPGKGLEWIGYIYDSGG |
| | | | | | | | | | ASRSTNYNPSLKSRVTISVDTSRNQLSLK |
| | | | | | | | | | LSSVTAADTAVYYCARDQRQFQLLGRFG |
| | | | | | | | | | WFDPWGQGTLVTVSS |
| COV2- | Ab | SARS-CoV2 | SARS-CoV1 | | SARS-CoV1, | S; non- | B-cells; SARS-CoV2 | 498 | QLQLQESGPGLVKPSETLSLTCTVSGGSI |
| 2574 | | | | | SARS-CoV2 | RBD | Human Patient | | SSTTYYWGWIRQPPGKGLEWIASIYYSG |
| | | | | | | | | | STYYNPSLKSRLTVSVDTSKNQFSLKLSS |
| | | | | | | | | | VTAADTAVYYCARQWKWFGEAWYFDL |
| | | | | | | | | | WGRGTLVTVSS |
| COV2- | Ab | SARS-CoV2 | SARS-CoV1 | | SARS-CoV1, | S; non- | B-cells; SARS-CoV2 | 499 | QVQLVQSGSELKKPGASVKVSCKASGYT |
| 2582 | | | | | SARS-CoV2 | RBD | Human Patient | | FTTYAMNWVRQAPGQGLEWMGWIN |
| | | | | | | | | | TNTGNPTYAQGFTGRFVFSLDTSVNTAF |
| | | | | | | | | | LHIGSLKAEDTAVYYCARDQDSGYPTYYY |
| | | | | | | | | | YYMDVWGKGTTVTVSS |
| COV2- | Ab | SARS-CoV1, | | | SARS-CoV2 | S; non- | B-cells; SARS-CoV2 | 500 | QVQLVQSGAEVKKPGASVKVSCKASGY |
| 2583 | | SARS-CoV2 | | | | RBD | Human Patient | | TFTSYDMNWVRQATGQGLEWMGWM |
| | | | | | | | | | NPNSGNTGYAQKFQGRVTMTRNTSIST |
| | | | | | | | | | AYMELSSLRSEDTAVYYCARGGIYYLVRG |
| | | | | | | | | | FIIGYYGMDVWGQGTTVTVSS |
| COV2- | Ab | SARS-CoV2 | SARS-CoV1 | | SARS-CoV1, | S; non- | B-cells; SARS-CoV2 | 501 | EVALVESGGGLVKPGGSLRLSCAASGFIF |
| 2584 | | | | | SARS-CoV2 | RBD | Human Patient | | SNAWMTWVRQAPGKGLEWVGRIKSK |
| | | | | | | | | | SEGGTPEYAAPVKGRFIISRDDSTNSLHL |
| | | | | | | | | | QMNYLRIEDTAVYYCTTGGYSSYAASDY |
| | | | | | | | | | WGQGTLVTVSS |
| COV2- | Ab | SARS-CoV2 | SARS-CoV1 | | SARS-CoV1, | S; RBD | B-cells; SARS-CoV2 | 502 | EVQLVESGGGLVQPGGSLRLSCAASGFT |
| 2585 | | | | | SARS-CoV2 | | Human Patient | | FSSYSMNWVRQAPGKGLEWVSYISSRS |
| | | | | | | | | | STIKYADSVKGRFTISRDNAKNSLYLQM |
| | | | | | | | | | NSLRDEDTAVYYCARVDYYGSGSVYWYF |
| | | | | | | | | | DLWGRGTLVTVSS |
| COV2- | Ab | SARS-CoV2 | SARS-CoV1 | | SARS-CoV1, | S; non- | B-cells; SARS-CoV2 | 503 | EVQLVESGGGLVQPGRSLRLSCAASGFT |
| 2586 | | | | | SARS-CoV2 | RBD | Human Patient | | FDDYAMHWVRQAPGKGLEWVSGISW |
| | | | | | | | | | NSGSIAYADSVKGRFTISRDNAKNSLYLQ |
| | | | | | | | | | MNSLRAEDTALYFCAKVGWELSIDAFDL |
| | | | | | | | | | WGQGTMVTVSS |
| COV2- | Ab | SARS-CoV1, | | | SARS-CoV2 | S; non- | B-cells; SARS-CoV2 | 504 | QITFKESGPTLVKPTETLTLTCTFSGFSV |
| 2587 | | SARS-CoV2 | | | | RBD | Human Patient | | STSGEGVGWIRQPPGKALEWLAVIYWD |
| | | | | | | | | | DDKRYSPSLKSRLTITRDTSKNQVVLTMT |
| | | | | | | | | | NMDPVDTATYYCAHRLWFRDAFDIWG |
| | | | | | | | | | QGTTVTVSS |
| COV2- | Ab | SARS-CoV2 | SARS-CoV1 | SARS-CoV2 | | S; RBD | B-cells; SARS-CoV2 | 505 | QVTLRESGPALVKPTQTLTLTCTFSGFSL |
| 2589 | | | | (weak) | | | Human Patient | | STSGMCVSWIRQPPGKALEWLARIDWD |
| | | | | | | | | | DDKYYSTSLETRLTISKDTSKNQVVLTMT |
| | | | | | | | | | NMDPVDTATYYCARIQYQLNGMDVW |
| | | | | | | | | | GQGTTVTVSS |
| COV2- | Ab | SARS-CoV1, | | | SARS-CoV2 | S; non- | B-cells; SARS-CoV2 | 506 | QVQLVQSGAEVKKPGASVKVSCKASGY |
| 2590 | | SARS-CoV2 | | | | RBD | Human Patient | | TFSSYDINWVRQATGQGLEWMGWVN |
| | | | | | | | | | PNSGHTGYAQKFQGRVTMTRNTSVSTA |
| | | | | | | | | | YMELSSLRSEDTAVFYCARGRVGYVGSG |
| | | | | | | | | | SRGYYYYYDMDVWGQGTTVTVSS |
| COV2- | Ab | SARS-CoV1, | | | SARS-CoV2 | S; non- | B-cells; SARS-CoV2 | 507 | EVQLVQSGAEVKKPGESLKISCKGSGYSF |
| 2602 | | SARS-CoV2 | | | | RBD | Human Patient | | TSYWIGWVRQMPGKGLEWMGIIYPGD |
| | | | | | | | | | SDTRYSPSFQGQVTISADKSISTAYLQWS |
| | | | | | | | | | SLKASDTAMYYCARPDYSSGWFSYWYF |
| | | | | | | | | | DLWGRGTLVTVSS |
| COV2- | Ab | SARS-CoV1, | | | SARS-CoV2 | S; non- | B-cells; SARS-CoV2 | 508 | QVQLVQSGSALKKPGASVKVSCKASGYT |
| 2610 | | SARS-CoV2 | | | | RBD | Human Patient | | FTSYAMNWVRQAPGQGLEWMGWINT |
| | | | | | | | | | NTGNPTYAQGFTGRFVFSLDTSVSTAYL |
| | | | | | | | | | QISSLKAEDTAVYYCARGRSYGLSLGYW |
| | | | | | | | | | GQGTLVTVSS |
| COV2- | Ab | SARS-CoV2 | SARS-CoV1 | | SARS-CoV1, | S; non- | B-cells; SARS-CoV2 | 509 | QVQLVESGGGVVQPGRSLRVSCAASGF |
| 2611 | | | | | SARS-CoV2 | RBD | Human Patient | | TFSSHGMHWVRQAPGKGLEWVSVIWY |
| | | | | | | | | | DGSNKYYADSVKGRFTISRDNSKNTLSL |
| | | | | | | | | | QMNSLRAEDTAVYYCARESADISSRLDY |
| | | | | | | | | | WGRGTLVTVSS |
| COV2- | Ab | SARS-CoV1, | | | SARS-CoV2 | S; non- | B-cells; SARS-CoV2 | 510 | QITFKESGPTLVKPTETLTLTCTFSGFSV |
| 2614 | | SARS-CoV2 | | | | RBD | Human Patient | | STSGEGVGWIRQPPGKALEWLAVIYWD |
| | | | | | | | | | DDKRYSPSLKSRLTITRDTSKNQVVLTMT |
| | | | | | | | | | NMDPVDTATYYCAHRLWFRDAFDIWG |
| | | | | | | | | | QGTTVTVSS |
| COV2- | Ab | SARS-CoV1, | | | SARS-CoV2 | S; non- | B-cells; SARS-CoV2 | 511 | EVQLVESGGGLVQPGGSLRLSCAASGFI |
| 2616 | | SARS-CoV2 | | | | RBD | Human Patient | | LSDHYMDWVRQAPGKGLEWVGRTRN |
| | | | | | | | | | KANSYTTEYAASVKGRFTISRDDSKNSLY |
| | | | | | | | | | LQMNSLKTEDTAVYYCASVITFGGVIVRS |
| | | | | | | | | | YWGQGTLVTVSS |
| COV2- | Ab | SARS-CoV1, | | | SARS-CoV2 | S; non- | B-cells; SARS-CoV2 | 512 | QVQLVQSGAEVKKPGSSVKVSCKASGG |
| 2617 | | SARS-CoV2 | | | | RBD | Human Patient | | TFSSYAISWVRQAPGQGLEWMGGIIPV |
| | | | | | | | | | FGTTNYAQKLQGRVTISADESTSTAYME |
| | | | | | | | | | VSSLRSEDTAVYYCARVSGYGDYGAYSD |
| | | | | | | | | | YWGQGTLVTVSS |
| COV2- | Ab | SARS-CoV2 | SARS-CoV1 | | SARS-CoV1, | S; RBD | B-cells; SARS-CoV2 | 513 | EVQLVESGGGLVQPGGSLRLSCVASEFT |
| 2618 | | | | | SARS-CoV2 | | Human Patient | | FSSYWMSWFRQAPGKGLEWVSGINW |
| | | | | | | | | | NGGSTGYADSVKGRFTISRDNAKNSLYL |
| | | | | | | | | | QMNSLKTEDTAVYYCASVITFGGVIVRSY |
| | | | | | | | | | WGQGTLVTVSS |
| COV2- | Ab | SARS-CoV1, | | | SARS-CoV2 | S; non- | B-cells; SARS-CoV2 | 514 | EVQLLESGGGLVQPGGSLRLSCAASGFT |
| 2619 | | SARS-CoV2 | | | | RBD | Human Patient | | FNNYAMSWVRQAPGKGLEWVSAIGGS |
| | | | | | | | | | GGSTYYADSVKGRFTVSRDNSENTLYLQ |
| | | | | | | | | | MSSLRAEDTAVYYCARVEGDWLLGGPY |
| | | | | | | | | | YHYYGMDVWGQGTTVTVSS |
| COV2- | Ab | SARS-CoV1, | | | SARS-CoV2 | S; non- | B-cells; SARS-CoV2 | 515 | QVQLVESGGGVVQPGRSLRLSCAASGF |
| 2620 | | SARS-CoV2 | | | | RBD | Human Patient | | TFSSYAMHWVRQAPGKGLEWVAGISY |
| | | | | | | | | | DGSNKYYADSVKGRFTISRDNSKNTLYL |
| | | | | | | | | | QMNSLRAEDTAVYYCARADTMVRGTYF |
| | | | | | | | | | EYWGQGTLVTVSS |
| COV2- | Ab | SARS-CoV2 | SARS-CoV1 | | SARS-CoV1, | S; non- | B-cells; SARS-CoV2 | 516 | QVQLVESGGGVVQPGRSLRLSCAASGF |
| 2621 | | | | | SARS-CoV2 | RBD | Human Patient | | TFSSYLMHWVRQAPGKGLEWVAVIWA |
| | | | | | | | | | NGNRYYADSVKGRFTISRDISKNTLYLQ |
| | | | | | | | | | MNSLRAEDTAMYYCARDYCNGVTCNS |
| | | | | | | | | | NYWGQGTLVTVSS |
| COV2- | Ab | SARS-CoV2 | SARS-CoV1 | | SARS-CoV1, | S; NTD | B-cells; SARS-CoV2 | 517 | QVQLQESGPGLVKPSGTLSLTCAVSGGS |
| 2622 | | | | | SARS-CoV2 | | Human Patient | | ISSSNWWSWVRQPPGKGLEWIGEIYHS |
| | | | | | | | | | GSTNYNPSLKSRVTISVDKSKNQFSLKLS |
| | | | | | | | | | SVTAADTAVYYCARGWYFDYWGQGTLV |
| | | | | | | | | | TVSA |
| COV2- | Ab | SARS-CoV2 | SARS-CoV1 | | SARS-CoV1, | S; non- | B-cells; SARS-CoV2 | 518 | QVQLVQSGAEVKKPGSSVKVSCKASGG |
| 2624 | | | | | SARS-CoV2 | RBD | Human Patient | | TFHNYAISWVRQAPGQGLEWMGGFIPI |
| | | | | | | | | | LGTTNYAQKFQGRVTITADESTSTAYME |
| | | | | | | | | | LSSLRSEDTAVYYCARVEGEGVDSYYYG |
| | | | | | | | | | MDVWGQGTTVTVSS |
| COV2- | Ab | SARS-CoV2 | SARS-CoV1 | SARS-CoV2 | | S; RBD | B-cells; SARS-CoV2 | 519 | EVQLVESGGGLVQPGRSLRLSCAASGFT |
| 2628 | | | | (weak) | | | Human Patient | | FDDYAMHWVRQAPGKGLEWVSGISW |
| | | | | | | | | | NSGTIGYADSVKGRFIISRDNAKNSLYLQ |
| | | | | | | | | | MNSLRPEDTALYYCAKDIIRQGEDGMD |
| | | | | | | | | | VWGQGTTVTVSS |
| COV2- | Ab | SARS-CoV2 | SARS-CoV1 | | SARS-CoV1, | S; RBD | B-cells; SARS-CoV2 | 520 | QLQVVQSGPGLVKPSETLSLTCTVSGDP |
| 2631 | | | | | SARS-CoV2 | | Human Patient | | VINTNYYWGWIRQPPGKGLEWIGTLSY |
| | | | | | | | | | SGGTHYNPSLSSRVTIAVDSSKKRFSLTL |
| | | | | | | | | | RSVTAADTAIYYCARHPVDGYNYGYSDL |
| | | | | | | | | | WGQGTLVTVSS |
| COV2- | Ab | SARS-CoV2 | SARS-CoV1 | | SARS-CoV1, | S; RBD | B-cells; SARS-CoV2 | 521 | QVQLVQSGAEVKKPGASVKVSCKASGY |
| 2632 | | | | | SARS-CoV2 | | Human Patient | | TFTDYYMHWVRQAPGQGLEWMGWI |
| | | | | | | | | | NPNSRGTNYAQKFQGRVTMTRDTSIST |
| | | | | | | | | | VYMELSRLTSDDTAVYYCARVVVLGYGR |
| | | | | | | | | | PNNYYDGRNVWDYWGQGTLVTVSS |
| COV2- | Ab | SARS-CoV1, | | | SARS-CoV2 | S; non- | B-cells; SARS-CoV2 | 522 | QVQLVESGGGVVQPGRSLRLSCAASGF |
| 2639 | | SARS-CoV2 | | | | RBD | Human Patient | | TFSSYAMHWVRQAPGKGLEWVAVISY |
| | | | | | | | | | DEINKYYADSVKGRFTISRDNSKTTLDLQ |
| | | | | | | | | | MNSLRAEDTAVYYCARAGGGSYRGPFD |
| | | | | | | | | | YWGQGTLVTVSS |
| COV2- | Ab | SARS-CoV1, | | | SARS-CoV2 | S; non- | B-cells; SARS-CoV2 | 523 | QVQLVESGGGVVQPGRSLRLSCAASGF |
| 2641 | | SARS-CoV2 | | | | RBD | Human Patient | | TFSTYAMHWVRQAPGKGLEWVTVISYD |
| | | | | | | | | | GSNKYYADSVKGRFTISRDNSKNTLYLQ |
| | | | | | | | | | MNSLRAEDTAVYYCAKSYNGNYYDAFDI |
| | | | | | | | | | WGQGTMVTVSS |
| COV2- | Ab | SARS-CoV2 | SARS-CoV1 | | SARS-CoV1, | S; non- | B-cells; SARS-CoV2 | 524 | QVQLVESGGGVVQPGRSLRLSCAASGF |
| 2643 | | | | | SARS-CoV2 | RBD | Human Patient | | TFSSYGMHWVRQAPGKGLEWVAVISY |
| | | | | | | | | | DGSNKYYADSVKGRFTISRDNAKNSLYL |
| | | | | | | | | | QMNSLRAEDTAVYYCARGSAGNYYYG |
| | | | | | | | | | MDVWGQGTTVTVSS |
| COV2- | Ab | SARS-CoV2 | SARS-CoV1 | | SARS-CoV1, | S; non- | B-cells; SARS-CoV2 | 525 | EVQLVQSGAEVKKPGESLKISCKGSGYSF |
| 2656 | | | | | SARS-CoV2 | RBD | Human Patient | | SDYWIGWVRQMPGKGLEWMGIIYPG |
| | | | | | | | | | DSDTRYSPSFQGQVTISADKSISTAYLQW |
| | | | | | | | | | SSLKASDTAMYYCARLTFGGSGSYYFYYN |
| | | | | | | | | | GMDVWGQGTTVTVSS |
| COV2- | Ab | SARS-CoV2 | SARS-CoV1 | | SARS-CoV1, | S; non- | B-cells; SARS-CoV2 | 526 | EVQLVESGGGLVQPGGSLRLSCAASGFT |
| 2660 | | | | | SARS-CoV2 | RBD | Human Patient | | FSSYDMHWVRQATGKGLEWVSAIGTA |
| | | | | | | | | | GDTYYPGSVKGRFTISRENAKNSLYLQM |
| | | | | | | | | | NSLRAGDTAVYYCARADPYQLLGQHYYY |
| | | | | | | | | | GMDVWGQGTTVTVSS |
| COV2- | Ab | SARS-CoV1, | | | SARS-CoV2 | S; non- | B-cells; SARS-CoV2 | 527 | QVHLVESGGGVVQPGRSLRLSCAASGF |
| 2669 | | SARS-CoV2 | | | | RBD | Human Patient | | TFSNYGMHWVRQAPGKGLEWVAVISN |
| | | | | | | | | | DEFNKFYANSVKGRFTISRDNSKNTVYL |
| | | | | | | | | | QLNSLRTEDTARYYCAKGGDGSGWAW |
| | | | | | | | | | DGDNPPTDYWGQGTLVIVSS |
| COV2- | Ab | SARS-CoV2 | SARS-CoV1 | | SARS-CoV1, | S; NTD | B-cells; SARS-CoV2 | 528 | QVTLKESGPVLVKPTETLTLTCAVSGFSL |
| 2673 | | | | | SARS-CoV2 | | Human Patient | | SNAKMGVSWIRQPPGKALEWLAHIFSN |
| | | | | | | | | | DEKAYSTSLKTRLTISKDTSKSQVVLTVT |
| | | | | | | | | | NMDPVDTATYYCARIVLGASGTYPSPGFD |
| | | | | | | | | | PWGQGTLVTVSS |
| COV2- | Ab | SARS-CoV2 | SARS-CoV1 | | SARS-CoV1, | S; non- | B-cells; SARS-CoV2 | 529 | QVQLVESGGGVVQPGRSLRLSCAASGF |
| 2675 | | | | | SARS-CoV2 | RBD | Human Patient | | TFSIYGMHWVRQAPGKGLEWVAVISFD |
| | | | | | | | | | GSNKYYADSVKGRFTISRDNSKNTLYLQ |
| | | | | | | | | | MNSLRAEDTAVYYCAKDGSGSYYGWFD |
| | | | | | | | | | PWGQGTLVTVSS |
| COV2- | Ab | SARS-CoV2 | SARS-CoV1 | SARS-CoV2 | | S; non- | B-cells; SARS-CoV2 | 530 | QVQLVQSGAEVKKPGSSVKVSCKASGG |
| 2676 | | | | (weak) | | RBD | Human Patient | | TFSSYAINWVRQAPGQGLEWMGGIIPIF |
| | | | | | | | | | GTANYAQKFQGRVTFTADESTSTAYME |
| | | | | | | | | | VSSLRSEDTAVYYCARSCGDCYSADLDF |
| | | | | | | | | | WGQGTLVTVSS |
| COV2- | Ab | SARS-CoV1, | | SARS-CoV2 | | S; RBD | B-cells; SARS-CoV2 | 531 | QLQLQESGPGLVKPSETLSLTCTVSGGSI |
| 2677 | | SARS-CoV2 | | | | | Human Patient | | SSSSYYWGWIRQPPGKGLEWIGSMYYS |
| | | | | | | | | | GSTYYNPSLKSRVTISVDTSKNQFSLKLS |
| | | | | | | | | | SVTAADTAVYYCARLLWLRGHFDYWGQ |
| | | | | | | | | | GTLVTVSS |
| COV2- | Ab | SARS-CoV1, | | SARS-CoV2 | | S; RBD | B-cells; SARS-CoV2 | 532 | EVQLVESGGGVVRPGGSLRLSCAASGFI |
| 2678 | | SARS-CoV2 | | | | | Human Patient | | FDDYDMTWVRQAPGKGLEWVSGISW |
| | | | | | | | | | NGGNTGYADSVKGRFTISRDNAKNSLYL |
| | | | | | | | | | QMNSLRAEDTALYHCAVIMSPIPRYSGY |
| | | | | | | | | | DWAGGAFDIWGQGTMVTVSS |
| COV2- | Ab | SARS-CoV1, | | | SARS-CoV2 | S; non- | B-cells; SARS-CoV2 | 533 | QVQLVESGGGVVQPGRSLRLSCAASGF |
| 2681 | | SARS-CoV2 | | | | RBD | Human Patient | | TFSFYAIHWVRQAPGQGLEWAAAISSD |
| | | | | | | | | | GTYKYYADSVKGRFTISRDNSKNTSYLQ |
| | | | | | | | | | MNSLRAEDTAVYYCARALNKGFDPWG |
| | | | | | | | | | QGTLLTVSS |
| COV2- | Ab | SARS-CoV2 | SARS-CoV1 | SARS-CoV2 | | S; RBD | B-cells; SARS-CoV2 | 534 | QMQLVQSGPEVKKPGTSVKVSCKTSGF |
| 2684 | | | | (weak) | | | Human Patient | | TFTSSAIQWVRQARGQRLEWIGWIVVG |
| | | | | | | | | | SGNTNYAQKFQERVTITRDMSTSTAYM |
| | | | | | | | | | ELSSLRSEDTAVYYCAAPHCNRTSCYDAF |
| | | | | | | | | | DLWGQGTMVTVSS |
| COV2- | Ab | SARS-CoV1, | | | SARS-CoV2 | S; non- | B-cells; SARS-CoV2 | 535 | QVQLVQSGAEVKKPGASVQVSCEASGY |
| 2685 | | SARS-CoV2 | | | | RBD | Human Patient | | TFTTYYMHWVRQAPGQGLEWMGIINP |
| | | | | | | | | | SGGSTTYAQKFQGRVTMTRDTSTSTVY |
| | | | | | | | | | MDLSSLRSEDTAVYYCARDRLGDGSYLG |
| | | | | | | | | | GGYYGMDVWGQGTTVTVSS |
| COV2- | Ab | SARS-CoV2 | SARS-CoV1 | SARS-CoV2 | | S; RBD | B-cells; SARS-CoV2 | 536 | QVQLVQSGAEVKKPGASVKVSCQASGY |
| 2693 | | | | (weak) | | | Human Patient | | TFTSYDINWVRQATGQGLEWMGWMK |
| | | | | | | | | | SNSGNTGYAQKFQGRVTMTRNTSISTA |
| | | | | | | | | | YMELTSLRSEDTAVYYCARMRSGWPTH |
| | | | | | | | | | GRPDDLWGRGTLVTVSS |
| COV2- | Ab | SARS-CoV2 | SARS-CoV1 | | SARS-CoV1, | S; RBD | B-cells; SARS-CoV2 | 537 | QVQLVQSGAEVKRPGSSVKVSCKASGG |
| 2694 | | | | | SARS-CoV2 | | Human Patient | | TFSSYTISWVRQAPGQGLEWMGRIIPIL |
| | | | | | | | | | AVANYAQKFQGRVTITADKSTSTAYMEL |
| | | | | | | | | | SSLRSEDTAVYYCARDHSGYYDSTSLMSP |
| | | | | | | | | | FFDYWGQGTLVTVSS |
| COV2- | Ab | SARS-CoV2 | SARS-CoV1 | | SARS-CoV1, | S; non- | B-cells; SARS-CoV2 | 538 | QVQLVQSGAEVKKPGASVKVSCKASGY |
| 2697 | | | | | SARS-CoV2 | RBD | Human Patient | | TFTSHYMHWVRQAPGQGLEWMGIINP |
| | | | | | | | | | SGGSTSYAQKFQGRVTMTGDTSTSTVY |
| | | | | | | | | | MELSSLRSEDTAVYYCARDLAGVPAALG |
| | | | | | | | | | CWFDPWGQGTLVTVSS |
| COV2- | Ab | SARS-CoV2 | SARS-CoV1 | | SARS-CoV1, | S; non- | B-cells; SARS-CoV2 | 539 | QVQLVESGGGVVQPGRSLRLSCAASGF |
| 2700 | | | | | SARS-CoV2 | RBD | Human Patient | | TFSTYAMHWVRQAPGKGLEWVAVISY |
| | | | | | | | | | DGGNKYYADSVKGRFTISRDNSKNTLYL |
| | | | | | | | | | QMNSLRAEDTAVYYCAKNLGPYCSGGT |
| | | | | | | | | | CYSLVGDYWGQGTLVTVSS |
| COV2- | Ab | SARS-CoV2 | SARS-CoV1 | | SARS-CoV1, | S; RBD | B-cells; SARS-CoV2 | 540 | EVQLVESGGGLVQPGGSLRLSCAASGFT |
| 2703 | | | | | SARS-CoV2 | | Human Patient | | FSSYDMHWVRQATGKGLEWVSAIGTA |
| | | | | | | | | | GDTYYPGSVKGRFTISRENAKNSLYLQM |
| | | | | | | | | | NSLRAGDTAVYYCARARGGYNWNFDY |
| | | | | | | | | | WGQGTLVTVSS |
| COV2- | Ab | SARS-CoV1, | | | SARS-CoV2 | S; RBD | B-cells; SARS-CoV2 | 541 | QVQLVESGGGVVQPGRSLRLSCAASGF |
| 2705 | | SARS-CoV2 | | | | | Human Patient | | TFSSYAMHWVRQAPGKGLEWVAVISY |
| | | | | | | | | | DGSYKYFADSVKGRFTISRDNSKNTLYLQ |
| | | | | | | | | | MNSLRAEDTAVYYCARDQGTVVTHFDY |
| | | | | | | | | | WGQGTLVTVSS |
| COV2- | Ab | SARS-CoV1, | | | SARS-CoV2 | S; RBD | B-cells; SARS-CoV2 | 542 | QVQLVESGGGVVQPGRSLRLSCAASGF |
| 2709 | | SARS-CoV2 | | | | | Human Patient | | TFSNYGMHWVRQAPGKGLEWVAVMS |
| | | | | | | | | | YDGSNKYYADSVKGRFTISRDNSKNTLYL |
| | | | | | | | | | QMNSLRAEDTAVYYCAKNLGPYCSGGT |
| | | | | | | | | | CYSLVGDYWGQGTLVTVSS |
| COV2- | Ab | SARS-CoV2 | SARS-CoV1 | | SARS-CoV1, | S; RBD | B-cells; SARS-CoV2 | 543 | QVQLVQSGAEVKKPGASVKVSCKASGY |
| 2710 | | | | | SARS-CoV2 | | Human Patient | | TFTSYDINWVRQATGQGLEWMGWMS |
| | | | | | | | | | PNSGNTGYAQKFQGRVTMTRDTSISTA |
| | | | | | | | | | YMELNSLRSEDTAVYYCARMRSGWPTH |
| | | | | | | | | | GRPDDHWGQGTLVTVSS |
| COV2- | Ab | SARS-CoV1, | | | SARS-CoV2 | S; RBD | B-cells; SARS-CoV2 | 544 | EVQLVESGGGVVQPGGSLRLSCAASGF |
| 2713 | | SARS-CoV2 | | | | | Human Patient | | TFDDYAMHWVRQAPGKGLEWVSLISG |
| | | | | | | | | | DGGNTYYADSVKGRFTISRDNSKNSLYL |
| | | | | | | | | | QMNSLRTEDTALYYCAKDEMAYPPSHH |
| | | | | | | | | | YYYYYMDVWGKGTTVTVSS |
| COV2- | Ab | SARS-CoV1, | | | SARS-CoV2 | S; RBD | B-cells; SARS-CoV2 | 545 | QVQLVQSGAEVKTPGASVKVSCKASGY |
| 2717 | | SARS-CoV2 | | | | | Human Patient | | TFTSYDINWVRQATGQGPEWMGWM |
| | | | | | | | | | NPNSGNTGYAHKFQGRVTMTRNTSIST |
| | | | | | | | | | AYMELSSLRSEDTAVYYCARGPSILTGFY |
| | | | | | | | | | NPLDYWGQGTLVTVSS |
| COV2- | Ab | SARS-CoV2 | SARS-CoV1 | | SARS-CoV1, | S; non- | B-cells; SARS-CoV2 | 546 | QLQLQESGPGLVKPSETLSLTCTVSGGSI |
| 2718 | | | | | SARS-CoV2 | RBD | Human Patient | | SSSNYYWGWIRQPPGKGLEWIGTIHYS |
| | | | | | | | | | GISYYNPSLKSRVTISVDTSNNKFSLELS |
| | | | | | | | | | SVTAADTAVYFCARRTYYDLWSAYSSTAY |
| | | | | | | | | | YCMDVWGKGTTVTVSS |
| COV2- | Ab | SARS-CoV1, | | SARS-CoV2 | | S; RBD | B-cells; SARS-CoV2 | 547 | QVRLVQSGAEVKKPGSSVKVSCKASGG |
| 2722 | | SARS-CoV2 | | | | | Human Patient | | TFSDYAISWVRQAPGQGLEWMGGIIPIF |
| | | | | | | | | | GTANYAQKFQGRVTITADEFTITAYMEL |
| | | | | | | | | | SSLRSEDTAVYYCARLSGSGWLGYAMD |
| | | | | | | | | | VWGQGTTVTVSS |
| COV2- | Ab | SARS-CoV2 | SARS-CoV1 | | SARS-CoV1, | S; non- | B-cells; SARS-CoV2 | 548 | QVQLVESGGGVVQPGRSLRLSCAASGF |
| 2726 | | | | | SARS-CoV2 | RBD | Human Patient | | TFSSYAMHWVRQAPGKGLEWVAVISN |
| | | | | | | | | | DGRNKYYADSVKGRLTISRDNSKNTLYL |
| | | | | | | | | | QMNSLRAEDTAVYYCARPSNWYFDLW |
| | | | | | | | | | GRGTLVTVSS |
| COV2- | Ab | SARS-CoV2 | SARS-CoV1 | SARS-CoV2 | | S; RBD | B-cells; SARS-CoV2 | 549 | EVQLVESGGGLVQPGRSLTLSCAASGFT |
| 2730 | | | | (weak) | | | Human Patient | | FDDYTMHWVRQAPGKGLEWVSGIDW |
| | | | | | | | | | NGGTIGYADSVKGRFTISRDNAKNSLYL |
| | | | | | | | | | QMNSLRAEDTALYYCAKAGYYAYVWGS |
| | | | | | | | | | YRFEYFDNWGQGTLVTVSS |
| COV2- | Ab | SARS-CoV2 | SARS-CoV1 | SARS-CoV2 | | S; RBD | B-cells; SARS-CoV2 | 550 | EVQLVESGGGLVQPGGSLRLSCAASGVT |
| 2733 | | | | | | | Human Patient | | VSSNYMSWVRQAPGKGLEWVSLIYSGG |
| | | | | | | | | | STFYADSVKGRFTISRHNSKNTLYLQMN |
| | | | | | | | | | SLRPEDTAVYYCARGPEPDAFDIWGQG |
| | | | | | | | | | TMVTVSS |
| COV2- | Ab | SARS-CoV1, | | SARS-CoV2 | | S; RBD | B-cells; SARS-CoV2 | 551 | QVQLQESGPGLVKPSETLSLTCTVSGGS |
| 2734 | | SARS-CoV2 | | (weak) | | | Human Patient | | VSSGSYYWSWIRQPPGKGLECIGYIYYSG |
| | | | | | | | | | SSNYNPSLKSRVTISVDTSKNQFSLKMSS |
| | | | | | | | | | VTAADTAVYYCAGSPVPPTIVGASYWG |
| | | | | | | | | | QGTLVTVSS |
| COV2- | Ab | SARS-CoV1, | | | SARS-CoV2 | S; RBD | B-cells; SARS-CoV2 | 552 | QVQLVESGGGVVQPGRSLRLSCAASGF |
| 2736 | | SARS-CoV2 | | | | | Human Patient | | TFSDYAMHWVRQAPGKGLEWVADISF |
| | | | | | | | | | DGSNKYYADSVKGRFTISRDSSENTLYLQ |
| | | | | | | | | | MDSLRADDTAVYYCARDLSTTWYLEM |
| | | | | | | | | | WGPDAFDIWGQGTVVTVSS |
| COV2- | Ab | SARS-CoV1, | | | SARS-CoV2 | S; RBD | B-cells; SARS-CoV2 | 553 | QVQLVESGGGVVQPGRSLRLSCAASGF |
| 2740 | | SARS-CoV2 | | | | | Human Patient | | TFRRYGMYWVRQAPGKGLEWVAVISY |
| | | | | | | | | | DGTDKYYTDSVKGRFTISRDNSKNTLYLQ |
| | | | | | | | | | MNSLRAEDTAVYYCAKKGGPYCGGGN |
| | | | | | | | | | CYAGYFDYWGQGTLVTVSS |
| COV2- | Ab | SARS-CoV1, | | | SARS-CoV2 | S; RBD | B-cells; SARS-CoV2 | 554 | QVQLQQWGAGLLKPSETLSLTCAVSGG |
| 2749 | | SARS-CoV2 | | | | | Human Patient | | SFSAYYWSWIRQPPGKGLEWIGEINHS |
| | | | | | | | | | GSTNYNPSLRSRVTISVDTSKNQFSLKLS |
| | | | | | | | | | SVTAADTAVYYCARVGYSQGYYYYYMDV |
| | | | | | | | | | WGKGTTVTVSS |
| COV2- | Ab | SARS-CoV2 | SARS-CoV1 | | SARS-CoV1, | S; RBD | B-cells; SARS-CoV2 | 555 | EVQVVESGGGLVQPGRSLRLSCVSSGFI |
| 2751 | | | | | SARS-CoV2 | | Human Patient | | FDDYVMHWVRQRPGKGLEWVAGITYN |
| | | | | | | | | | GGILGYGDSVKGRFIIARDNVRGFLSLQ |
| | | | | | | | | | MGDLRTEDTALYYCARDYCSSTTCPAET |
| | | | | | | | | | YYYMDVWGKGTAVTVSS |
| COV2- | Ab | SARS-CoV2 | SARS-CoV1 | SARS-CoV2 | | S; RBD | B-cells; SARS-CoV2 | 556 | EVQLVESGGGLIQPGGSLRLSCAASEVT |
| 2752 | | | | | | | Human Patient | | VSSNYMSWVRQAPGKGLEWVSLIYSGG |
| | | | | | | | | | TTYYADSVKGRFTISRDNSKNTLYLQMN |
| | | | | | | | | | SLRAEDTAVYYCARDFLRWHDLWGQG |
| | | | | | | | | | TLVTVSS |
| COV2- | Ab | SARS-CoV1, | | | SARS-CoV2 | S; RBD | B-cells; SARS-CoV2 | 557 | EVQLVESGGGLVQPGGSLRLSCAASGFT |
| 2753 | | SARS-CoV2 | | | | | Human Patient | | FSSYDMHWVRQATGKGLEWVSTIGTA |
| | | | | | | | | | GDTYYPDSVKGRFTISRENAKNSLFLQM |
| | | | | | | | | | NSLRAGDTAVYYCARVDFDILTGYYSNW |
| | | | | | | | | | GQGTLVTVSS |
| COV2- | Ab | SARS-CoV2 | SARS-CoV1 | | SARS-CoV1, | S; RBD | B-cells; SARS-CoV2 | 558 | EAQLLESGGALVQPGGSLRLSCAASGFT |
| 2756 | | | | | SARS-CoV2 | | Human Patient | | FSCCAMGWVRQAPGRGLEWVSSIHDD |
| | | | | | | | | | GVGTFYAVSVKGRFSISRDNSKNTVYLQ |
| | | | | | | | | | MNGLRAEDTGVYYCAKWAGPIVMKYY |
| | | | | | | | | | LQYWGQGALVTVSS |
| COV2- | Ab | SARS-CoV1, | | | SARS-CoV2 | S; RBD | B-cells; SARS-CoV2 | 559 | EVQLVESGGGLVQPGGSLRLSCAASGFT |
| 2758 | | SARS-CoV2 | | | | | Human Patient | | FSSYDMHWVRQATGKGLEWVSAIGTA |
| | | | | | | | | | GDTYYPDSVKGRFTISRENAKNSLYLQM |
| | | | | | | | | | NSLRAGDTAVYYCARGGDSGYDLGAWY |
| | | | | | | | | | FDLWGRGTLVTVSS |
| COV2- | Ab | SARS-CoV2 | SARS-CoV1 | | SARS-CoV1, | S; RBD | B-cells; SARS-CoV2 | 560 | EVQLVQSGAEVKKPGESLKISCKGSGYSF |
| 2759 | | | | | SARS-CoV2 | | Human Patient | | TNYWIGWVRQMPGKGLEWMGIIYPG |
| | | | | | | | | | DSDTRYSPSFQGQVTISADKSISTAYLQW |
| | | | | | | | | | SSLKASDTAMYYCARTPTLYNWFHPWG |
| | | | | | | | | | QGTPVTVSS |
| COV2- | Ab | SARS-CoV2 | SARS-CoV1 | SARS-CoV2 | | S; RBD | B-cells; SARS-CoV2 | 561 | QVTLRESGPALVKPTQTLTLTCTFSGFSL |
| 2760 | | | | (weak) | | | Human Patient | | STSGLCVSWIRQPPGKALEWLARIDWDD |
| | | | | | | | | | DKYYNTSLRTRLTISKDTSKNQVVLTMTN |
| | | | | | | | | | MDPVDTATYYCARATTFFYGMDVWGQ |
| | | | | | | | | | GTTVTVSS |
| COV2- | Ab | SARS-CoV2 | SARS-CoV1 | | SARS-CoV1, | S; RBD | B-cells; SARS-CoV2 | 562 | QLQLQESGPGLVKPSETLSLTCTVSGGSI |
| 2762 | | | | | SARS-CoV2 | | Human Patient | | SSSSYYWGWIRQPPGKGLEWIGSIYYSG |
| | | | | | | | | | ITYYNPSLKSRVTISVDTSKNQFSLKLSS |
| | | | | | | | | | VTAADTAVYYCARHQRYCSSSSCHVWDYW |
| | | | | | | | | | GQGTLVTVSS |
| COV2- | Ab | SARS-CoV1, | | | SARS-CoV2 | S; RBD | B-cells; SARS-CoV2 | 563 | EVQLVESGGGLVQPGRSLRLSCAASGFT |
| 2765 | | SARS-CoV2 | | | | | Human Patient | | FDDYAMNWVRQPPGKGLEWVSGISW |
| | | | | | | | | | NSDSIGYADSVKGRFTISRDNAKNSLYLQ |
| | | | | | | | | | MNSLRAEDTAMYYCAKGRGAGYTSYM |
| | | | | | | | | | DVWGKGTTVTVSS |
| COV2- | Ab | SARS-CoV2 | SARS-CoV1 | | SARS-CoV1, | S; RBD | B-cells; SARS-CoV2 | 564 | EVQLVESGGGLVQPGGSLRLSCAASGFT |
| 2767 | | | | | SARS-CoV2 | | Human Patient | | VSSNYMSWVRQAPGKGLEWVSVIYPG |
| | | | | | | | | | GSAFYADSVKGRFTISRHNSNNTLCLQM |
| | | | | | | | | | NSLRTEDTAVYYCARSYDILTGYRDAFDI |
| | | | | | | | | | WGQGTMVTVSS |
| COV2- | Ab | SARS-CoV2 | SARS-CoV1 | | SARS-CoV1, | S; RBD | B-cells; SARS-CoV2 | 565 | QVQLVESGGGVVQPGRSLRLSCAASGF |
| 2768 | | | | | SARS-CoV2 | | Human Patient | | TFSSYAMHWVRQAPGKGLEWVAVISY |
| | | | | | | | | | DGSNKYYADSVKGRFTISRDNSKNTLYL |
| | | | | | | | | | QMNSLRAEDTAVYYCARDDNSPQGSG |
| | | | | | | | | | WYFYYYYAMDVWGQGTTVTVSS |
| COV2- | Ab | SARS-CoV2 | SARS-CoV1 | | SARS-CoV1, | S; NTD | B-cells; SARS-CoV2 | 566 | QVQLVESGGGVVQPGRSLRLSCAASGF |
| 2769 | | | | | SARS-CoV2 | | Human Patient | | TFSTYAMHWVRQAPGKGLEWVAVISY |
| | | | | | | | | | DGSNKYYADSVKGRFTISRDNSKNTLYL |
| | | | | | | | | | QMIGLRAEDTAVYYCARDWAPTYYDM |
| | | | | | | | | | PSAFDIWGQGTMVTVSS |
| COV2- | Ab | SARS-CoV1, | | | SARS-CoV2 | S; non- | B-cells; SARS-CoV2 | 567 | EVQLVESGGGLVQPGGSLRLSCAASGFT |
| 2774 | | SARS-CoV2 | | | | RBD | Human Patient | | FSSYWMTWVRQAPGKGLEWVANIKQ |
| | | | | | | | | | DGSEKYYVDSVKGRFTISRDNAKNSLSL |
| | | | | | | | | | QMNSLRVEDTAVYYCVRLGVSSWYFDY |
| | | | | | | | | | WGQGTLVTVSS |
| COV2- | Ab | SARS-CoV1, | | | SARS-CoV2 | S; non- | B-cells; SARS-CoV2 | 568 | EVQLVESGGDLVQPGGSLRLTCAASGFT |
| 2776 | | SARS-CoV2 | | | | RBD | Human Patient | | FSSHWMTWVRQAPGKGLEWVANIKE |
| | | | | | | | | | DGREKYYVDSVKGRLTISRDNAKNSLYL |
| | | | | | | | | | QMNSLRAEDTAVYYCARVVVEVATNKG |
| | | | | | | | | | IHGVDYYYYYYMDVWGKGTTVTVSS |
| COV2- | Ab | SARS-CoV2 | SARS-CoV1 | SARS-CoV2 | | S; RBD | B-cells; SARS-CoV2 | 569 | QVQLQQWGAGLLKPSETLSRTCAVYGA |
| 2780 | | | | (weak) | | | Human Patient | | SFSNYYWSWIRQPPGKGLEWIGEINHSE |
| | | | | | | | | | NTNYNPSLKSRVTISVDTSKNQFSLRLSS |
| | | | | | | | | | VTAADTAVYYCARLRYSSSGGHIFDYWG |
| | | | | | | | | | QGTLVTVSS |
| COV2- | Ab | SARS-CoV1, | | | SARS-CoV2 | S; RBD | B-cells; SARS-CoV2 | 570 | QVQLVQSGAEVKKPGSSVKVSCKASGG |
| 2783 | | SARS-CoV2 | | | | | Human Patient | | TFSSYAISWVRQAPGQGLEWMGGIIPIF |
| | | | | | | | | | GTANYAQKFQGRVTITADESTSTAYMEL |
| | | | | | | | | | SSLRSEDTAVYYCARGLTGSSAYKDEIYF |
| | | | | | | | | | DYWGQGTLVTVSS |
| COV2- | Ab | SARS-CoV2 | SARS-CoV1 | | SARS-CoV1, | S; non- | B-cells; SARS-CoV2 | 571 | QVQLQESGPGLVKPSETLSLTCTVSGGSI |
| 2784 | | | | | SARS-CoV2 | RBD | Human Patient | | SSYYWSWIRQPPGKGLEWIGYIYYSGST |
| | | | | | | | | | KYNPSLKSRVTISVDTSKNQFSLKLSSVT |
| | | | | | | | | | AADTAVYYCARDGGNAYSSGWYRYYYH |
| | | | | | | | | | MDVWGKGTTVTVSS |
| COV2- | Ab | SARS-CoV2 | SARS-CoV1 | | SARS-CoV1, | S; RBD | B-cells; SARS-CoV2 | 572 | EVQLVESGGGLVQPGGSLRLSCAASGFT |
| 2786 | | | | | SARS-CoV2 | | Human Patient | | FSSYDLHWVRQGTGKRLEWVSAIGTAG |
| | | | | | | | | | DTYYLGSVKGRFTISRENAKNSLYLQMN |
| | | | | | | | | | SLRAGDTAVYYCARVLYDSSGFYNWFDP |
| | | | | | | | | | WGQGTLVTVSS |
| COV2- | Ab | SARS-CoV2 | SARS-CoV1 | | SARS-CoV1, | S; RBD | B-cells; SARS-CoV2 | 573 | QVQLVQSGAEVKKPGASVRVSCKAPGY |
| 2789 | | | | | SARS-CoV2 | | Human Patient | | TFTTYYIHWVRQAPGQGLEWMGIINPS |
| | | | | | | | | | AGSTTYAQKFQGRVTMTRDTSTSTVYM |
| | | | | | | | | | ELSSLRSEDTAVYYCARGFHVPAALRNW |
| | | | | | | | | | FDPWGQGTLVTVSS |
| COV2- | Ab | SARS-CoV2 | SARS-CoV1 | SARS-CoV2 | | S; RBD | B-cells; SARS-CoV2 | 574 | EVQLVESGGGLVQPGGSLRLSCAASGFT |
| 2790 | | | | | | | Human Patient | | VSSNYMSWVRQAPGKGLEWVSVIYPG |
| | | | | | | | | | GSAFYADSVKGRFTISRHNSNNTLCLQM |
| | | | | | | | | | NSLRTEDTAVYYCARSYDILTGYRDAFDI |
| | | | | | | | | | WGQGTMVTVSS |
| COV2- | Ab | SARS-CoV1, | | | SARS-CoV2 | S; RBD | B-cells; SARS-CoV2 | 575 | EAQLVESGGGLVQPGGSLRLSCEASGFI |
| 2794 | | SARS-CoV2 | | | | | Human Patient | | FSSYWMSWVRQAPGKGLEWVANIKQ |
| | | | | | | | | | DGSEKYYVDSVKGRFTISRDNAKNSLYL |
| | | | | | | | | | QMNSLRAEDTAVYYCARVNDGRPNPLE |
| | | | | | | | | | YYFDYWGQGTLVTVSS |
| COV2- | Ab | SARS-CoV2 | SARS-CoV1 | | SARS-CoV1, | S; RBD | B-cells; SARS-CoV2 | 576 | QVQLQESGPGLVKPSQTLSLTCTVSGDSI |
| 2796 | | | | | SARS-CoV2 | | Human Patient | | SSGRYYWSWIRQHPGKGLEWIGFVYYS |
| | | | | | | | | | GSTYYNPSLKSRVTISVDTSKNQFSLRLS |
| | | | | | | | | | SVTAADTAVYYCARETYSAYEMPPYFDY |
| | | | | | | | | | WGQGTLVTVSS |
| COV2- | Ab | SARS-CoV1, | | | SARS-CoV2 | S; RBD | B-cells; SARS-CoV2 | 577 | EVQLVQSGAEVKKPGESLKISCKGSGYSF |
| 2797 | | SARS-CoV2 | | | | | Human Patient | | TSYWIGWVRQMPGKGLEWMGIIQPG |
| | | | | | | | | | DSDTRYSPSFQGQVTMSADKSTSTAYLQ |
| | | | | | | | | | WSSLKASDTAMYYCARDLIIESTIAARPG |
| | | | | | | | | | YYGMDVWGQGTTVTVSS |
| COV2- | Ab | SARS-CoV2 | SARS-CoV1 | | SARS-CoV1, | S; RBD | B-cells; SARS-CoV2 | 578 | QVHLVQSGAEVKKPGASVKLSCKASGYT |
| 2801 | | | | | SARS-CoV2 | | Human Patient | | FTNYLLHWVRQAPGQGLEWMGNVNP |
| | | | | | | | | | SRGTATYPQKLDDRVTMTSDKSASTIYM |
| | | | | | | | | | ELSGLRSEDTAIYYCARERSGTYFFDYWG |
| | | | | | | | | | QGTLLTVSS |
| COV2- | Ab | SARS-CoV2 | SARS-CoV1 | SARS-CoV2 | | S; RBD | B-cells; SARS-CoV2 | 579 | QVTLRESGPALVKPTQTLTLTCTFSGFSL |
| 2807 | | | | | | | Human Patient | | TTSGMCVSWIRQPPGKALEWLARIDWD |
| | | | | | | | | | DDKYYSTSLQTRLTISKDTSKNQVVLTMT |
| | | | | | | | | | NMDPVDTATYYCARETPVTAIDYWGQ |
| | | | | | | | | | GTLVTVSS |
| COV2- | Ab | SARS-CoV1, | | | SARS-CoV2 | S; RBD | B-cells; SARS-CoV2 | 580 | QVQLVQSGAEVKKPGSSVKVSCKASGFT |
| 2808 | | SARS-CoV2 | | | | | Human Patient | | FMSSAVQWVRQARGQRLEWIGWIVIG |
| | | | | | | | | | SGNTNYAQKFQERVTITRDMSTSTAYM |
| | | | | | | | | | ELSSLRSEDTAVYYCAAPYCSSISCNDGF |
| | | | | | | | | | DIWGQGTMVTVSS |
| COV2- | Ab | SARS-CoV2 | SARS-CoV1 | | SARS-CoV1, | S; RBD | B-cells; SARS-CoV2 | 581 | QVQLVQSGAEVKKPGASVKVSCKVSGY |
| 2809 | | | | | SARS-CoV2 | | Human Patient | | TFTGYVVHWVRQAPGQDLEWMGWIN |
| | | | | | | | | | TGYGNTKYSQKFQGRVTISWDTSATTAY |
| | | | | | | | | | MELSNLKSEDKAVYYCASMTRMSEQTY |
| | | | | | | | | | YGMDVWGQGTTVTVSS |
| COV2- | Ab | SARS-CoV1, | | | SARS-CoV2 | S; non- | B-cells; SARS-CoV2 | 582 | QVQLVESGGGVVQPGRSLRLSCAASGF |
| 2811 | | SARS-CoV2 | | | | RBD | Human Patient | | TFSSFAMHWVRQAPGKGLEWVAVISY |
| | | | | | | | | | DGSNKYYADSVKGRFTISRDNSKNTLYL |
| | | | | | | | | | QMNSLRAEDTAAYYCARELMSVGWGQ |
| | | | | | | | | | GTLVTVSS |
| COV2- | Ab | SARS-CoV2 | SARS-CoV1 | SARS-CoV2 | | S; RBD | B-cells; SARS-CoV2 | 583 | EVQLVESGGGLIQPGGSLRLSCAASGITV |
| 2812 | | | | | | | Human Patient | | SSNYMSWVRQAPGKGLEWVSVIYAGG |
| | | | | | | | | | STYYADSVKGRFTISRDNSKNTLYLQMN |
| | | | | | | | | | SLRAEDTAVYYCARDALYYNGPGRDGM |
| | | | | | | | | | DVWGQGTTVTVSS |
| COV2- | Ab | SARS-CoV2 | SARS-CoV1 | SARS-CoV2 | | S; RBD | B-cells; SARS-CoV2 | 584 | EVQLVESGGGLIQPGGSLRLSCAASGITV |
| 2813 | | | | | | | Human Patient | | SSNYMSWVRQAPGKGLEWVSVIYAGG |
| | | | | | | | | | STYYADSVKGRFTISRDNSKNTLYLQMN |
| | | | | | | | | | SLRAEDTAVYYCARDALYYNGPGRDGM |
| | | | | | | | | | DVWGQGTTVTVSS |
| COV2- | Ab | SARS-CoV1, | | | SARS-CoV2 | S; non- | B-cells; SARS-CoV2 | 585 | QVQLVESGGGVVQPGRSLRLSCAASGF |
| 2814 | | SARS-CoV2 | | | | RBD | Human Patient | | TFSSYGMHWVRQAPGKGLEWVAVISS |
| | | | | | | | | | DGSNKYYAGSVKGRFTISRDNSKNTLYL |
| | | | | | | | | | QMNSLRAEDTAVYYCAKDMVEPLFSHY |
| | | | | | | | | | YYYGMDVWGQGTTVTVSS |
| COV2- | Ab | SARS-CoV2 | SARS-CoV1 | | SARS-CoV1, | S; NTD | B-cells; SARS-CoV2 | 586 | QVQLQESGPGLVKPSETLSLTCTVSGGSI |
| 2816 | | | | | SARS-CoV2 | | Human Patient | | SSYYWSWIRQPPGKGLEWIGYIYYSGST |
| | | | | | | | | | NYNPSLKSRVTISVDMSKNQFSLKLRSVT |
| | | | | | | | | | AADTAVYYCARAPRERLQWGEYYFDYW |
| | | | | | | | | | GQGTLVTVSS |
| COV2- | Ab | SARS-CoV1, | | | SARS-CoV2 | S; RBD | B-cells; SARS-CoV2 | 587 | EVQLVESGGGLVQPGGSLRLSCAASGFT |
| 2817 | | SARS-CoV2 | | | | | Human Patient | | FRSYDMHWVRQVTGKGLEWVSTIGTA |
| | | | | | | | | | GDTYYPGSVKGRFTISRENAKNSLYLQM |
| | | | | | | | | | NSLRAGDTAVYYCARVFETKVIRGGRYY |
| | | | | | | | | | YYYYMDVWGKGTTVTVSS |
| COV2- | Ab | SARS-CoV2 | SARS-CoV1 | | SARS-CoV1, | S; non- | B-cells; SARS-CoV2 | 588 | QVQLQQWGAGLLKPSETLSLTCAVYGG |
| 2818 | | | | | SARS-CoV2 | RBD | Human Patient | | SFSGYYWSWIRQPPGKGLEWIGEINHS |
| | | | | | | | | | GSTNYNPSLKSRVTISVDTSKNHFSLKM |
| | | | | | | | | | NSVTAADTAVYYCARCRQMGNFYYYYM |
| | | | | | | | | | DVWGKGTTVTVSS |
| COV2- | Ab | SARS-CoV2 | SARS-CoV1 | SARS-CoV2 | | S; RBD | B-cells; SARS-CoV2 | 589 | QVQLQESGPGLVKPSQTLSLTCTVSGDSI |
| 2819 | | | | | | | Human Patient | | SSAGYYWSWIRQHPGKGLEWIGYIYYSG |
| | | | | | | | | | RTYYNPSLKSRVTMSVDTSKNQFSLRLRS |
| | | | | | | | | | VTAADTAVYYCARVVPTRGPVAWFDP |
| | | | | | | | | | WGQGTLVTVSS |
| COV2- | Ab | SARS-CoV1, | | | SARS-CoV2 | S; non- | B-cells; SARS-CoV2 | 590 | QVQLVESGGGVVQPGRSLRLSCAASGF |
| 2820 | | SARS-CoV2 | | | | RBD | Human Patient | | TFSSYGMHWVRQAPGKGLEWVAVIWY |
| | | | | | | | | | DGSKKDYADSVKGRFTISRDNSKNTLYL |
| | | | | | | | | | QMNSLRAEDTAVYYCARDQSQGAYILT |
| | | | | | | | | | GYRGYGMDVWGQGTTVTVSS |
| COV2- | Ab | SARS-CoV1, | | | SARS-CoV2 | S; RBD | B-cells; SARS-CoV2 | 591 | QVQLVQSGAEVKKPGSSVKVSCKTAGG |
| 2821 | | SARS-CoV2 | | | | | Human Patient | | TSSSYAISWVRQAPGQGLEWMGRIIPIL |
| | | | | | | | | | GVAIYAQKFQGRVTITADKSTSTAYMEL |
| | | | | | | | | | NSLRSEDTAVYYCTTTQGGDYGDNLYYL |
| | | | | | | | | | DYWGQGTLVTVSS |
| COV2- | Ab | SARS-CoV2 | SARS-CoV1 | | SARS-CoV1, | S; RBD | B-cells; SARS-CoV2 | 592 | EVQLVESGGGLVQPGGSLRLSCAASGVT |
| 2822 | | | | | SARS-CoV2 | | Human Patient | | VSSNYMSWVRQAPGKGLEWVSLIYSGG |
| | | | | | | | | | STFYADSVKGRFTISRHNSKNTLYLQMN |
| | | | | | | | | | SLRPEDTAVYYCARGPEPDAFDIWGQG |
| | | | | | | | | | TMVTVSS |
| COV2- | Ab | SARS-CoV2 | SARS-CoV1 | | SARS-CoV1, | S; RBD | B-cells; SARS-CoV2 | 593 | QVQLVQSGAEVKKPGASVKVSCKASGD |
| 2826 | | | | | SARS-CoV2 | | Human Patient | | TFTTYYIHWVRQAPGQGLEWMGIINPS |
| | | | | | | | | | GGSRSYAQKFQGRISMTSDTSTSTVYME |
| | | | | | | | | | LSSLRSEDTAVYYCARGYGFVPNVLYYFD |
| | | | | | | | | | YWGQGTLVTVST |
| COV2- | Ab | SARS-CoV1, | | SARS-CoV2 | | S; RBD | B-cells; SARS-CoV2 | 594 | EVQLVESGGGLVKPGGSLRLSCAASGFT |
| 2828 | | SARS-CoV2 | | | | | Human Patient | | FRDYSMNWVRQAPGKGLEWVSSISSG |
| | | | | | | | | | GSYIYYADSVKGRFTISRDNAKNSLYLQM |
| | | | | | | | | | NSLRAEDTAVYYCARGGSILWWLIDYW |
| | | | | | | | | | GQGTLVTVSS |
| COV2- | Ab | SARS-CoV2 | SARS-CoV1 | | SARS-CoV1, | S; NTD | B-cells; SARS-CoV2 | 595 | EVQLLESGGGLVQPGGSLRLSCAASGFT |
| 2830 | | | | | SARS-CoV2 | | Human Patient | | FTSYAMSWVRQAPGKGLEWVSGISISG |
| | | | | | | | | | GSTYYAASVKGRFTISRDNSKNTLYLQM |
| | | | | | | | | | NSLRAEDTAVYYCAKDSRSGIAGVDAFD |
| | | | | | | | | | IWGQGTMVTVSS |
| COV2- | Ab | SARS-CoV2 | SARS-CoV1 | SARS-CoV2 | | S; RBD | B-cells; SARS-CoV2 | 596 | EVQLVESGGGLVQPGGSLRLSCAASGLT |
| 2832 | | | | | | | Human Patient | | VSSNYMSWVRQAPGKGLECVSVIYAGG |
| | | | | | | | | | NTYYADSVKGRFTISRDNSKNTLYLQMN |
| | | | | | | | | | SLRAEDTAVYYCARGDGGYYSPFDYWG |
| | | | | | | | | | QGTLVTVSS |
| COV2- | Ab | SARS-CoV1, | | | SARS-CoV2 | S; RBD | B-cells; SARS-CoV2 | 597 | QITLKESGPTLVKPTQTLTLTCTFSGFSL |
| 2834 | | SARS-CoV2 | | | | | Human Patient | | STSGVGVAWIRQPPGKALEWLALIYWDD |
| | | | | | | | | | DKRYSPSLKSRLTITKDTSKNQVVLTMTN |
| | | | | | | | | | MDPVDTATYYCAHRLPTPQLLPSFENW |
| | | | | | | | | | FDPWGQGTLVTVSS |
| COV2- | Ab | SARS-CoV2 | SARS-CoV1 | SARS-CoV2 | | S; RBD | B-cells; SARS-CoV2 | 598 | EVQLVESGGGLVQPGGSLRLSCAASGLT |
| 2835 | | | | | | | Human Patient | | VGSNYMNWVRQAPGKGLEWVSVIYSG |
| | | | | | | | | | GSTFYADSVKGRFTISRDNSKNTLYLQLN |
| | | | | | | | | | SLRAEDTAVYYCAREVVGYFDCWGQGT |
| | | | | | | | | | LVTVSS |
| COV2- | Ab | SARS-CoV2 | SARS-CoV1 | SARS-CoV2 | | S; RBD | B-cells; SARS-CoV2 | 599 | QVQLQESGPGLVKPSETLSLTCTVSGGSI |
| 2841 | | | | | | | Human Patient | | SSYYWSWIRQPPGKGLEWIGHIYYTGSS |
| | | | | | | | | | YYNPSLKSRVTISLDTSKNQFSLKLNSVT |
| | | | | | | | | | AADTAVYYCARLRWLRGGIDFWGQGTLV |
| | | | | | | | | | IVSS |
| COV2- | Ab | SARS-CoV1, | | | SARS-CoV2 | S; RBD | B-cells; SARS-CoV2 | 600 | QVQLVQSGAEVKKPGASVKVSCKASGD |
| 2842 | | SARS-CoV2 | | | | | Human Patient | | TFTTYYIHWVRQAPGQGLEWMGIINPS |
| | | | | | | | | | GGSRSYAQKFQGRISMTSDTSTSTVYME |
| | | | | | | | | | LSSLRSEDTAVYYCARGYGFVPNVLYYFD |
| | | | | | | | | | YWGQGILVTVSS |
| COV2- | Ab | SARS-CoV1, | | | SARS-CoV2 | S; non- | B-cells; SARS-CoV2 | 601 | QVELVESGGGVVQPGRSLRLSCAASGFI |
| 2844 | | SARS-CoV2 | | | | RBD | Human Patient | | FSSYAMHWVRQAPGKGLEWVAVISYD |
| | | | | | | | | | GGNKYYADSVKGRFTISRDNSKNTLYLQ |
| | | | | | | | | | MNSLRAEDTAVYYCARAQGGNYYYGM |
| | | | | | | | | | DVWGQGTTVTVSS |
| COV2- | Ab | SARS-CoV1, | | SARS-CoV2 | | S; RBD | B-cells; SARS-CoV2 | 602 | QVQLVESGGGVVQPGRSLRLSCAASGF |
| 2848 | | SARS-CoV2 | | (weak) | | | Human Patient | | TFSRYAMYWVRQAPGKGLEWVALISYD |
| | | | | | | | | | GRNEYYADSVKGRFTISRDNSKNTLYLQ |
| | | | | | | | | | MNSLRAGDSAVYYCARDLAYHPYRDYG |
| | | | | | | | | | DDDYYYYYGMDVWGQGTTVTVSS |
| COV2- | Ab | SARS-CoV2 | SARS-CoV1 | | SARS-CoV1, | S; RBD | B-cells; SARS-CoV2 | 603 | QVQLVQSGAEVKKPGASVKVSCKASGY |
| 2853 | | | | | SARS-CoV2 | | Human Patient | | TFTSYYMHWVRQAPGQGLEWMGIINP |
| | | | | | | | | | GGGSTTYAQKFQGRVTMTSDTSTSTVY |
| | | | | | | | | | MELSSLRSEDTAMYYCARGAIPPNSRAE |
| | | | | | | | | | IDYWGQGTLVTVSS |
| COV2- | Ab | SARS-CoV1, | | | SARS-CoV2 | S; RBD | B-cells; SARS-CoV2 | 604 | QVQLVQSGAEVKKPGASVKVSCKASGY |
| 2863 | | SARS-CoV2 | | | | | Human Patient | | TFTSYYLHWVRQAPGQGLEWMGIINPS |
| | | | | | | | | | GGSTTYAQKFQGRVTMTRDTSTSAVYM |
| | | | | | | | | | ELRSLRSEDTAVYYCARENDYGDYVEPR |
| | | | | | | | | | DYYYGMDVWGQGTTVTVSS |
| COV2- | Ab | SARS-CoV2 | SARS-CoV1 | | SARS-CoV1, | S; non- | B-cells; SARS-CoV2 | 605 | QVQLVESGGGVVQPGRSLRLSCAASGF |
| 2872 | | | | | SARS-CoV2 | RBD | Human Patient | | TFSTYGMHWVRQAPGKGLEWVAVIWY |
| | | | | | | | | | DGNKKYCADSVKGRCTISRDNSKNTLYL |
| | | | | | | | | | QMNSLRAEDTAVYYCAREGPFGDREAS |
| | | | | | | | | | GAFDVWGQGTMVTVSS |
| COV2- | Ab | SARS-CoV1, | | | SARS-CoV2 | S; RBD | B-cells; SARS-CoV2 | 606 | QVQLVESGGGLVKPGGSLRLSCAASGFT |
| 2873 | | SARS-CoV2 | | | | | Human Patient | | FSDYYMSWIRQAPGKGLEWVSYISSSGI |
| | | | | | | | | | TIYYADSVKGRFTISRDNAKNSLYLQMNS |
| | | | | | | | | | LRAEDTAVYYCTGVVAAPAEYFQHWGQ |
| | | | | | | | | | GTLVTVSS |
| COV2- | Ab | SARS-CoV1, | | SARS-CoV2 | | S; RBD | B-cells; SARS-CoV2 | 607 | EVQLVESGGGLVQPGGSLRLSCAASGFT |
| 2878 | | SARS-CoV2 | | (weak) | | | Human Patient | | FSRHWMTWVRQAPGKGLEWVANIKQ |
| | | | | | | | | | DGSEKYYVDSVKGRLTISRDNAKNSLYL |
| | | | | | | | | | QMNSLRAEDTAVYYCARLGFYYGGADY |
| | | | | | | | | | WGQGTLVTVSS |
| COV2- | Ab | SARS-CoV1, | | | SARS-CoV2 | S; non- | B-cells; SARS-CoV2 | 608 | QVQLVESGGGVVQPGRSLRLSCAASGF |
| 2883 | | SARS-CoV2 | | | | RBD | Human Patient | | TFSTYGMHWVRQAPGKGLEWVAVISY |
| | | | | | | | | | DGSNKYYADSVKGRFTISRDNSKNTLYL |
| | | | | | | | | | QMNSLRAEDTAMYYCAKDGSIAAADY |
| | | | | | | | | | WGQGTLVTVSS |
| COV2- | Ab | SARS-CoV2 | SARS-CoV1 | | SARS-CoV1, | S; RBD | B-cells; SARS-CoV2 | 609 | QVQLVQAGAEVKKPGASVKVSCKASGY |
| 2891 | | | | | SARS-CoV2 | | Human Patient | | TFTSYYMHWVRQAPGQGLEWMGIINP |
| | | | | | | | | | SGGSTSYAQKFQGRVTMTRDTSTSTVY |
| | | | | | | | | | MELSSLRSEDTAVYYCARGAAVPAAGEF |
| | | | | | | | | | DYWGQGTLVTVSS |
| COV2- | Ab | SARS-CoV1, | | | SARS-CoV2 | S; RBD | B-cells; SARS-CoV2 | 610 | QVQLVESGGGVVQSGGSLRLSCAASGF |
| 2894 | | SARS-CoV2 | | | | | Human Patient | | TFSTYGMHWVRQAPGKGLEWVAIISYD |
| | | | | | | | | | GINKYYADSVKGRFTISRDNSKNTVYLQ |
| | | | | | | | | | MNSLRTEDTAMYYCAKGDGSYLMDYF |
| | | | | | | | | | DYWGQGTLVTVSS |
| COV2- | Ab | SARS-CoV2 | SARS-CoV1 | | SARS-CoV1, | S; RBD | B-cells; SARS-CoV2 | 611 | EVQLVESGGGLVQPGGSLRLSCAASGFT |
| 2901 | | | | | SARS-CoV2 | | Human Patient | | VSSNYMSWVRQAPGKGLEWVSVIYPG |
| | | | | | | | | | GSAFYADSVKGRFTISRHNSNNTLCLQM |
| | | | | | | | | | NSLRTEDTAVYYCARSYDILTGYRDAFDI |
| | | | | | | | | | WGQGTMVTVSS |
| COV2- | Ab | SARS-CoV1, | | | SARS-CoV2 | S; non- | B-cells; SARS-CoV2 | 612 | QVQLQQWGAGLLKPSETLSLTCAVYGG |
| 2904 | | SARS-CoV2 | | | | RBD | Human Patient | | SFSGYYWSWIRQPPGKGLEWIGEINHS |
| | | | | | | | | | GSTNYNPSLKSRVTISVDTSKNHFSLKM |
| | | | | | | | | | NSVTAADTAVYYCARCRQMGNFYYYYM |
| | | | | | | | | | DVWGKGTTVTVSP |
| COV2- | Ab | SARS-CoV1, | | | SARS-CoV2 | S; RBD | B-cells; SARS-CoV2 | 613 | EVQLVQSGAEVKKPGESLKISCKGSGYSF |
| 2906 | | SARS-CoV2 | | | | | Human Patient | | TSYWVGWVRQMPGKGLEWMGIIYPG |
| | | | | | | | | | DSDTRDSPSFQGQVTISADKSISTAYLQ |
| | | | | | | | | | WSSLKASDTAMYYCARLGSESKIDYYYY |
| | | | | | | | | | GMDVWGQGTTVTVSS |
| COV2- | Ab | SARS-CoV2 | SARS-CoV1 | | SARS-CoV1, | S; RBD | B-cells; SARS-CoV2 | 614 | QVQLVQSGAEVKKPGSSVKVSCKASGD |
| 2909 | | | | | SARS-CoV2 | | Human Patient | | TFSSYTINWVRQAPGQGLEWMGRIIPIL |
| | | | | | | | | | GIPNYAQKFQGRVTITADKSTSTAFMEL |
| | | | | | | | | | SSLRSEDTAVYYCARGRGYSNYGASYYM |
| | | | | | | | | | DVWGKGTTVTVSS |
| COV2- | Ab | SARS-CoV2 | SARS-CoV1 | | SARS-CoV1, | S; RBD | B-cells; SARS-CoV2 | 615 | QLQLRESGPGLVKPSETLSLTCTVSGGSI |
| 2911 | | | | | SARS-CoV2 | | Human Patient | | SSSSYYWGWIRQPPGKGLEWIGSIYYSG |
| | | | | | | | | | STYYNPSLKSRVTISVDTSKNQFSLKLSS |
| | | | | | | | | | VTAADTAVFYCARMSRGYNYAYTFDIWG |
| | | | | | | | | | QGTMVTVSS |
| COV2- | Ab | SARS-CoV2 | SARS-CoV1 | SARS-CoV2 | | S; RBD | B-cells; SARS-CoV2 | 616 | QVTLRESGPALVKPTQTLTLTCTFSGFSL |
| 2919 | | | | | | | Human Patient | | STSGMCLSWIRQPPGKALEWLARIDWD |
| | | | | | | | | | DDKYYSTSLETRLTISKDTSKNQVVLTMT |
| | | | | | | | | | NMDPVDTGTYYCARTMATINAFDIWG |
| | | | | | | | | | QGTMVTVSS |
| COV2- | Ab | SARS-CoV1, | | | SARS-CoV2 | S; non- | B-cells; SARS-CoV2 | 617 | QVQLVESGGGVVQPGRSLRLSCAASGF |
| 2933 | | SARS-CoV2 | | | | RBD | Human Patient | | TFSYYPMHWLWVRQAPGKGLEWVAVT |
| | | | | | | | | | SYDGTNKYYADSVKGRFTISRDNSKNTLY |
| | | | | | | | | | LQMNSLRAEDTAVYYCARGGATNFDY |
| | | | | | | | | | WGQGTLVTVSS |
| COV2- | Ab | SARS-CoV2 | SARS-CoV1 | | SARS-CoV1, | S; non- | B-cells; SARS-CoV2 | 618 | QVQLVQSGSELKKPGASVKVSCKASEYT |
| 2934 | | | | | SARS-CoV2 | RBD | Human Patient | | FTSYAMNWVRQAPGQGLEWMGWINT |
| | | | | | | | | | NTGNPTYAQGFTGRFVFSLDTSVSTAYL |
| | | | | | | | | | QISSLKAEDTAVYYCARPGKAAAFDYWG |
| | | | | | | | | | QGTLVTVSS |
| COV2- | Ab | SARS-CoV2 | SARS-CoV1 | | SARS-CoV1, | S; RBD | B-cells; SARS-CoV2 | 619 | QVQLVESGGGVVQPGRSLRLSCAASGF |
| 2939 | | | | | SARS-CoV2 | | Human Patient | | TFSSYGMHWVRQAPGKGLEWVAVIWY |
| | | | | | | | | | DGSNKYYAESVKGRFTISRDNSKNTLYLQ |
| | | | | | | | | | MNSLRAEDTAVYYCARDLHQDWVVVV |
| | | | | | | | | | AANVYGMDVWGQGTTVTVSS |
| COV2- | Ab | SARS-CoV2 | SARS-CoV1 | SARS-CoV2 | | S; RBD | B-cells; SARS-CoV2 | 620 | QMQLVQSGPEVKKPGTSVKVSCKASGF |
| 2941 | | | | (weak) | | | Human Patient | | TFMSSAVQWVRQARGQRLEWIGWIVI |
| | | | | | | | | | GSGNTNYAQKFQERVTITRDMSTSTAY |
| | | | | | | | | | MELSSLRSEDTAVYYCAAPYCSSISCNDG |
| | | | | | | | | | FDIWGQGTMVTVSS |
| COV2- | Ab | SARS-CoV2 | SARS-CoV1 | | SARS-CoV1, | S; non- | B-cells; SARS-CoV2 | 621 | QVTLRESGPALVKPTQTLTLTCTFSGFSL |
| 2942 | | | | | SARS-CoV2 | RBD | Human Patient | | STSGLCVSWIRQPPGKALEWLARIDWDD |
| | | | | | | | | | DKYYNTSLRTRLTISKDTSKNQVVLTMTN |
| | | | | | | | | | MDPVDTATYYCARATTFFYGMDVWGQ |
| | | | | | | | | | GTTATVSS |
| COV2- | Ab | SARS-CoV1, | | | SARS-CoV2 | S; RBD | B-cells; SARS-CoV2 | 622 | QVQLVESGGGVVQPGRSLRLSCAASGF |
| 2944 | | SARS-CoV2 | | | | | Human Patient | | TFRRYGMYWVRQAPGKGLEWVAVISY |
| | | | | | | | | | DGTDKYYTDSVKGRFTISRDNSKNTLYLQ |
| | | | | | | | | | MNSLRAEDTAVYYCAKKGGPYCGGGN |
| | | | | | | | | | CYAGYFDYWGQGILVTVSS |
| COV2- | Ab | SARS-CoV1, | | | SARS-CoV2 | S; RBD | B-cells; SARS-CoV2 | 623 | EVQVVESGGGLVQPGRSLRLSCAASGFT |
| 2945 | | SARS-CoV2 | | | | | Human Patient | | FEDYAMHWVRQAPGKGLEWVSGVSW |
| | | | | | | | | | NSGIIGYADSVKGRFTISRDNAKNSLYLQ |
| | | | | | | | | | MNSLRAEDTALYYCAKLDVGGYDFVSG |
| | | | | | | | | | HYYAFDIWGQGTMVTVSS |
| COV2- | Ab | SARS-CoV2 | SARS-CoV1 | | SARS-CoV1, | S; non- | B-cells; SARS-CoV2 | 624 | QVQLVQSGSELKKPGASVKVSCKASGYT |
| 2947 | | | | | SARS-CoV2 | RBD | Human Patient | | FSDYAMNWVRQAPGQGLEWMGWIN |
| | | | | | | | | | TNTGNPTYAQGFTGRFVFSLDTSVSTAY |
| | | | | | | | | | LQISSLKAEDTAVYYCARGLISLFRGAIF |
| | | | | | | | | | HYYYGMDVWGQGTTVTVSS |
| COV2- | Ab | SARS-CoV2 | SARS-CoV1 | SARS-CoV2 | | S; RBD | B-cells; SARS-CoV2 | 625 | EVQLVESGGGLVQPGGSLRLSCAASGLT |
| 2952 | | | | | | | Human Patient | | VRSNYMTWVRQTPGKGLEWVSVIYSG |
| | | | | | | | | | GSTFYADSVKGRFTISRDNSKNTVYLQM |
| | | | | | | | | | NSLRAEDTAVYYCARDLVTYGLDVWGQ |
| | | | | | | | | | GTTVTVSS |
| COV2- | Ab | SARS-CoV1, | | | SARS-CoV2 | S; RBD | B-cells; SARS-CoV2 | 626 | QITLKESGPTLVKPTQTLTLTCTFSGFSL |
| 2953 | | SARS-CoV2 | | | | | Human Patient | | STKRVGVGWIRQPPGKALEWLALIYWDD |
| | | | | | | | | | DQRYSPSLKSRLTITKDTSKNQVVLTMT |
| | | | | | | | | | NMDPVDTATYYCAHSGPPDLSPVLSQG |
| | | | | | | | | | WFDPWGQGTLVTVSS |
| COV2- | Ab | SARS-CoV2 | SARS-CoV1 | SARS-CoV2 | | S; RBD | B-cells; SARS-CoV2 | 627 | QVQLVESGGGVVQPGRSLRLSCAASGF |
| 2955 | | | | | | | Human Patient | | TFVTSGIHWVRQAPGKGLEWVAVISYD |
| | | | | | | | | | GSNKYYADSVKGRFTISRDNSKNTLYLQ |
| | | | | | | | | | MNSLRAEDTAVYYCAKGGPNKEVLYFG |
| | | | | | | | | | ELLDYGMDVWGQGTTVTVSS |
| COV2- | Ab | SARS-CoV1, | | | SARS-CoV2 | S; non- | B-cells; SARS-CoV2 | 628 | QVQVVQSGAEVKKPGASVKVSCKASGY |
| 2960 | | SARS-CoV2 | | | | RBD | Human Patient | | TFKNYGISWVRQAPGQGLEWMGWISA |
| | | | | | | | | | YTGNTNYAQKFQGRMTMTTDTSTGTG |
| | | | | | | | | | YMELRSLRSDDTAVYYCARVQRRRLDY |
| | | | | | | | | | WGQGTLVIVSS |
| COV2- | Ab | SARS-CoV2 | SARS-CoV1 | SARS-CoV2 | | S; RBD | B-cells; SARS-CoV2 | 629 | QMQLVQSGPEVKKPGTSVKVSCKASGF |
| 2961 | | | | | | | Human Patient | | TFMSSAVQWVRQARGQRLEWIGWIVI |
| | | | | | | | | | GSGNTNYAQKFQERVTITRDMSTSTAY |
| | | | | | | | | | MELSSLRSEDTAVYYCAAPYCSSISCNDG |
| | | | | | | | | | FDIWGQGTMVTVSS |
| COV2- | Ab | SARS-CoV2 | SARS-CoV1 | | SARS-CoV1, | S; RBD | B-cells; SARS-CoV2 | 630 | QVQLVQSGAEVKKPGASVKVSCKASGY |
| 2997 | | | | | SARS-CoV2 | | Human Patient | | TFTSYYMHWVRQAPGQGLEWMGIINP |
| | | | | | | | | | GGGSTTYAQKFQGRVTMTSDTSTSTVY |
| | | | | | | | | | MELSSLRSEDTAMYYCARGAIPPNSRAE |
| | | | | | | | | | IDYWGQGTLVTVSS |
| COV2- | Ab | SARS-CoV2 | SARS-CoV1 | | SARS-CoV1, | S; RBD | B-cells; SARS-CoV2 | 631 | QVQLVESGGGVVQPGRSLRLSCAASGF |
| 3010 | | | | | SARS-CoV2 | | Human Patient | | TFSDYAMHWVRQAPGKGLEWVADISF |
| | | | | | | | | | DGSNKYYADSVKGRFTISRDSSENTLYLQ |
| | | | | | | | | | MDSLRADDTAVYYCARDLSTTWYLEM |
| | | | | | | | | | WGPDAFDIWGQGTVVTVSS |
| COV2- | Ab | SARS-CoV2 | SARS-CoV1 | | SARS-CoV1, | S; RBD | B-cells; SARS-CoV2 | 632 | EVQLVESGGGLVQPGGSLRLSCAASGFT |
| 3012 | | | | | SARS-CoV2 | | Human Patient | | FSSYDLHWVRQGTGKRLEWVSAIGTAG |
| | | | | | | | | | DTYYLGSVKGRFTISRENAKNSLYLQMN |
| | | | | | | | | | SLRAGDTAVYYCARVLYDSSGFYNWFDP |
| | | | | | | | | | WGQGTLVTVSS |
| COV2- | Ab | SARS-CoV2 | SARS-CoV1 | | SARS-CoV1, | S; RBD | B-cells; SARS-CoV2 | 633 | QVQLVESGGGVVQPGRSLRLSCAASGF |
| 3013 | | | | | SARS-CoV2 | | Human Patient | | TFSNYGMHWVRQAPGKGLEWVAVMS |
| | | | | | | | | | YDGSNKYYADSVKGRFTISRDNSKNTLYL |
| | | | | | | | | | QMNSLRAEDTAVYYCAKNLGPYCSGGT |
| | | | | | | | | | CYSLVGDYWGQGTLVTVSS |
| COV2- | Ab | SARS-CoV2 | SARS-CoV1 | SARS-CoV2 | | S; RBD | B-cells; SARS-CoV2 | 634 | EVQLVQSGPEVKKPGTSVKVSCKASGFT |
| 3025 | | | | | | | Human Patient | | FMSSAVQWVRQARGQRLEWIGWIVIG |
| | | | | | | | | | SGNTNYAQKFQERVTITRDMSTSTAYM |
| | | | | | | | | | ELSSLRSEDTAVYYCAAPYCSSISCNDGF |
| | | | | | | | | | DIWGQGTMVTVSS |
| COV2- | Ab | SARS-CoV1, | | | SARS-CoV2 | S; RBD | B-cells; SARS-CoV2 | 635 | EVQLVESGGGVVQPGGSLRLSCAASGF |
| 3029 | | SARS-CoV2 | | | | | Human Patient | | TFDDYAMHWVRQAPGKGLEWVSLISG |
| | | | | | | | | | DGGNTYYADSVKGRFTISRDNSKNSLYL |
| | | | | | | | | | QMNSLRTEDTALYYCAKDEMAYPPSHH |
| | | | | | | | | | YYYYYMDVWGKGTTVTVSS |
| COV2- | Ab | SARS-CoV1, | | | SARS-CoV2 | S; non- | B-cells; SARS-CoV2 | 636 | EVQLVESGGGLVQPGGSLRLSCAASGFT |
| 3057 | | SARS-CoV2 | | | | RBD | Human Patient | | FSSYWMSWVRQAPGKGLEWVANIKQ |
| | | | | | | | | | DGSEKYFVDSVKGRFTISRDNAKNSLYL |
| | | | | | | | | | QMNSLRAEDAAVYYCARLVTTVTTANG |
| | | | | | | | | | LYYYSYYYMDVWGKGTTVTVSS |
| COV2- | Ab | SARS-CoV1, | | | SARS-CoV2 | S; non- | B-cells; SARS-CoV2 | 637 | EVQLVESGGGAVQPGRSLRLSCAASGFT |
| 3058 | | SARS-CoV2 | | | | RBD | Human Patient | | FSTYAMYWVRQAPGKGLEWVAVISYD |
| | | | | | | | | | GSNRYYADSVKGRFTISRDNSKNTLYLQ |
| | | | | | | | | | MNSLRPEDTAVYYCARDRSGNYRDAFD |
| | | | | | | | | | IWGQGTMVTVSS |
| COVA1- | Ab | SARS-CoV2 | SARS-CoV1 | | SARS-CoV1, | S; non- | B-cells; SARS-CoV2 | 638 | HQHQVEQGPGGVEQSETLFLTCCVSGG |
| 01 | | | | | SARS-CoV2 | RBD | Human Patient | | FTISSCYKRGGIRQPPRKGEEWAVSSYYS |
| | | | | | | | | | SSTYYTPSLKSRVTISVDKSKNQFSLKMS |
| | | | | | | | | | SVTAADTAVYYCARVSSGYYFTPFDYWG |
| | | | | | | | | | QGTRGHRLF |
| COVA1- | Ab | SARS-CoV2 | SARS-CoV1 | | SARS-CoV1, | S; non- | B-cells; SARS-CoV2 | 639 | EVQLVESGGGVVQPGRSLRLSCAASGFT |
| 02 | | | | | SARS-CoV2 | RBD | Human Patient | | FSIYAMHWVRQAPGKGLEWVAVISYD |
| | | | | | | | | | GSNQYYADSVRGRFTISRGNSKNTLYLQ |
| | | | | | | | | | MNSLRPEDTAVYYCARARGGSYNDAFD |
| | | | | | | | | | IWGQGTMVTVSS |
| COVA1- | Ab | SARS-CoV2 | SARS-CoV1 | SARS-CoV2 | SARS-CoV1 | link | B-cells; SARS-CoV2 | 640 | EVQLVESGGGVVQPGRSLRLSCAASGFT |
| 03 | | | | | | | Human Patient | | FSSYGMHWVRQAPGKGLEWVAVISYD |
| | | | | | | | | | GSNKYYADSVKGRFTISRDNSKNTLYLQ |
| | | | | | | | | | MNSLRAEDTAVYYCAKDGQYYDFWSGY |
| | | | | | | | | | LGARTNPHYYYYMDVWGKGTMVTVSS |
| COVA1- | Ab | SARS-CoV2 | SARS-CoV1 | | SARS-CoV1, | S; non- | B-cells; SARS-CoV2 | 641 | EVQLVQSGGGLVQPGRSLRLSCAASGFT |
| 06 | | | | | SARS-CoV2 | RBD | Human Patient | | FGEYAMHWVRQAPGKGLEWVSGISW |
| | | | | | | | | | NSGSIDYADSVKGRFTISRDNAKNSLYLQ |
| | | | | | | | | | MNSLRAEDTALYYCAKDMGEAVAGTHY |
| | | | | | | | | | GMDVWGQGTMVTASS |
| COVA1- | Ab | SARS-CoV1, | | | SARS-CoV1, | S; non- | B-cells; SARS-CoV2 | 642 | QVQLVESGAEVKKPGSSVKVSCKASGGT |
| 07 | | SARS-CoV2 | | | SARS-CoV2 | RBD | Human Patient | | LSSYAITWVRQAPGQGLEWVGGIIPIFG |
| | | | | | | | | | TANYAQKFQGRVTITADESTSTAYMELS |
| | | | | | | | | | SLRSEDTAVYYCARVGAYDSSGYSNDYW |
| | | | | | | | | | GQGTLVTVSS |
| COVA1- | Ab | SARS-CoV2 | SARS-CoV1 | | SARS-CoV1, | S; RBD | B-cells; SARS-CoV2 | 643 | EVQLVESGGGVVQPGGSLRLSCAASGF |
| 08 | | | | | SARS-CoV2 | | Human Patient | | TFSSYAMHWVRQAPGKGLEWVAVISY |
| | | | | | | | | | DGSNKYYADSVKGRFTISRDNSKNTLYL |
| | | | | | | | | | QMNSLRAEDTAVYYCAREDYYDSSGSF |
| | | | | | | | | | DYWGQGTLVTVSS |
| COVA1- | Ab | SARS-CoV2 | SARS-CoV1 | | SARS-CoV1, | S; non- | B-cells; SARS-CoV2 | 644 | QLQLVESGPGLVKPSETLSLTCTVSGGSI |
| 09 | | | | | SARS-CoV2 | RBD | Human Patient | | SSYFWSWIRQPPGKGLEWIGYIYYSGST |
| | | | | | | | | | NYNPSLKSRVTISVDTSKNQFSLKLSSVT |
| | | | | | | | | | AADTAVYYCARHSQGWLQQAVAFDIWG |
| | | | | | | | | | QGTMVTVSS |
| COVA1- | Ab | SARS-CoV2 | SARS-CoV1 | | SARS-CoV1, | S; RBD | B-cells; SARS-CoV2 | 645 | EVQLVESGGGLVQPGGSLRLSCAASGFT |
| 10 | | | | | SARS-CoV2 | | Human Patient | | VTSTYMTWVRRAPGKGLEWVSIIYNDD |
| | | | | | | | | | TTYYADSVKDRVTVSRDDSKNTLYLQM |
| | | | | | | | | | NSLRAEDTAIYYCARGGYYYDPSGYYSRS |
| | | | | | | | | | FSFDYWGQGTLVTVSS |
| COVA1- | Ab | SARS-CoV2 | SARS-CoV1 | SARS-CoV2 | SARS-CoV1 | S; RBD | B-cells; SARS-CoV2 | 646 | EVQLVQSGTEVKKPGASVKVSCKASGYT |
| 12 | | | | | | | Human Patient | | FPGYYIHWVRQAPGQGLEWMGWINP |
| | | | | | | | | | NSGVAKSAQKFQGRVTMTRDSSISTVYL |
| | | | | | | | | | DVTSDDTAVYYCARDLVWATVSGTMD |
| | | | | | | | | | VWGQGTTVTVSS |
| COVA1- | Ab | SARS-CoV1, | | SARS-CoV1, | | S; RBD | B-cells; SARS-CoV2 | 647 | QVQLVQSGAEVKKPGASVKVSCKASGY |
| 16 | | SARS-CoV2 | | SARS-CoV2 | | | Human Patient | | TFTSYYMHWVRQAPGQGLEWMGIINS |
| | | | | | | | | | SGGSTSYAQKFQGRVTMTRDTSTSTVY |
| | | | | | | | | | MELSSLRSEDTAVYYCARPPRNYYDRSG |
| | | | | | | | | | YYQRAEYFQHWGQGTLVTVSS |
| COVA1- | Ab | SARS-CoV2 | SARS-CoV1 | SARS-CoV2 | SARS-CoV1 | S; RBD | B-cells; SARS-CoV2 | 648 | EVQLVESGGGLVQPGGSLRLSCAASGFT |
| 18 | | | | | | | Human Patient | | VSSNYMSWVRQAPGKGLEWVSVIYSG |
| | | | | | | | | | GSTYYADSVKGRFTISRDNSKNTLYLQM |
| | | | | | | | | | NSLRAEDTAVYYCARVEWAAAGTFYWG |
| | | | | | | | | | QGTLVTVSS |
| COVA1- | Ab | SARS-CoV2 | SARS-CoV1 | | SARS-CoV1, | S; non- | B-cells; SARS-CoV2 | 649 | QVQLVESGGGLVKPGGSLRLSCAASGFT |
| 19 | | | | | SARS-CoV2 | RBD | Human Patient | | FSSYSMNWVRQAPGKGLEWVSSISSSSS |
| | | | | | | | | | FIYYADSVKGRFTISRDNAKNSLYLQMNS |
| | | | | | | | | | LRAEDTAVYYCARWKSDYYDSSGYYPAA |
| | | | | | | | | | FDIWGQRDKWSPSS |
| COVA1- | Ab | SARS-CoV2 | SARS-CoV1 | | SARS-CoV1, | S; non- | B-cells; SARS-CoV2 | 650 | QVQLVESGGGLVKPGGSLRLSCAASGFT |
| 20 | | | | | SARS-CoV2 | RBD | Human Patient | | FSSYSMNWVRQAPGKGLEWVSSISSSSS |
| | | | | | | | | | YIYYADSVKGRFTISRDDAKNSLFLQMNS |
| | | | | | | | | | LRAEDTAVYYCAGDQNLYCSGDSCYYHY |
| | | | | | | | | | YGMDVWGQGTVVTVSS |
| COVA1- | Ab | SARS-CoV2 | SARS-CoV1 | SARS-CoV2 | SARS-CoV1 | S; non- | B-cells; SARS-CoV2 | 651 | EVQLVESGGGVVQPGRSLRLSCAASGFT |
| 21 | | | | | | RBD | Human Patient | | FSSYAMHWVRQAPGKGLEWVAVISYD |
| | | | | | | | | | GSNKYYADSVKGRFTISRDNTKNTLYLQ |
| | | | | | | | | | MNSLRAEDTAVYYCARDSEYYDILTGYL |
| | | | | | | | | | APTHYYYYYMDVWGKGTTVTVSS |
| COVA1- | Ab | SARS-CoV2 | SARS-CoV1 | | SARS-CoV1, | S; non- | B-cells; SARS-CoV2 | 652 | EVQLVESGAEVKKPGASVKVSCKASGYT |
| 22 | | | | | SARS-CoV2 | RBD | Human Patient | | FTSYGISWVRQAPGQGLEWMGWISAY |
| | | | | | | | | | NGYTNSAQKLQGRVTMTTDTSTSTAYM |
| | | | | | | | | | ELRSLRSDDTAVYYCARDLVDTAMVQTL |
| | | | | | | | | | DDYGMDVWGQGTMVTVSS |
| COVA1- | Ab | SARS-CoV2 | SARS-CoV1 | | SARS-CoV1, | S; non- | B-cells; SARS-CoV2 | 653 | QVQLVQSGAEVKKPGESLKISCKGSGYR |
| 23 | | | | | SARS-CoV2 | RBD | Human Patient | | FTTYWIGWVRQMPGKGLEWMGIIYPG |
| | | | | | | | | | DSDTRYSPSFQGQVTISADKSISTAYLQW |
| | | | | | | | | | SSLTASDTAIYYCARYYYDSRGYTSIDFW |
| | | | | | | | | | GQGTLVTVSS |
| COVA1- | Ab | SARS-CoV2 | SARS-CoV1 | | SARS-CoV1, | S; non- | B-cells; SARS-CoV2 | 654 | EVQLVESGPGLVKPSETLSLTCTVSGGSI |
| 25 | | | | | SARS-CoV2 | RBD | Human Patient | | SSTSYYWGWIRQPPGKGLECIGSIYYSGS |
| | | | | | | | | | TYYNPSLKSRVTISVDTSKNQFSLKLSSV |
| | | | | | | | | | TAADTAVYYCARLNYDFWSGYYSYALYY |
| | | | | | | | | | MDVWGKGTMVTVSS |
| COVA1- | Ab | SARS-CoV2 | SARS-CoV1 | | SARS-CoV1, | S; non- | B-cells; SARS-CoV2 | 655 | QLQLQESGPGLVKPSQTLSLTCTVSGGSI |
| 26 | | | | | SARS-CoV2 | RBD | Human Patient | | SSGGYYWSWIRQLPGKGLEWIGYIYYSG |
| | | | | | | | | | STYYNPSLKSRVTISVDTSKNQFSLNLSS |
| | | | | | | | | | VTAADTAVYYCARQQLDYYDSSGCFDYW |
| | | | | | | | | | GQGTLVTVSS |
| COVA1- | Ab | SARS-CoV1, | | | SARS-CoV1, | S; non- | B-cells; SARS-CoV2 | 656 | EVQLVESGPGLVKPSETLSLTCTVSGGSI |
| 27 | | SARS-CoV2 | | | SARS-CoV2 | RBD | Human Patient | | SSYYWSWIRQPPGKRLEWIGYIYYSGST |
| | | | | | | | | | NYNPSLKSRVTISVDTSKNQFSLKLNSVT |
| | | | | | | | | | AADTAAYYCARGFDYWGQGTRVTVSS |
| COVA2- | Ab | SARS-CoV2 | SARS-CoV1 | | SARS-CoV1, | S; RBD | B-cells; SARS-CoV2 | 657 | EVQLVESGGGLVQPGGSLRLSCAASGFT |
| 01 | | | | | SARS-CoV2 | | Human Patient | | FSSYDMHWVRQTTGKGLQWVSAIGTA |
| | | | | | | | | | GDTYYPGSVKGRFTISRENAKNSLYLQM |
| | | | | | | | | | NSLRAGDTAVYYCARGGDRYPVGYFDL |
| | | | | | | | | | WGRGTLVTVSS |
| COVA2- | Ab | SARS-CoV1, | | SARS-CoV1, | | S; RBD | B-cells; SARS-CoV2 | 658 | VQLQQESGPGLVKPSETLSLTCTVSGGSI |
| 02 | | SARS-CoV2 | | SARS-CoV2 | | | Human Patient | | SSSSYYWGWIRQPPGKGLEWIGSIYYSG |
| | | | | (weak) | | | | | STYYNPSLKSRVTISVDTSKNQFSLKLSS |
| | | | | | | | | | VTAADTAVYYCARRSTSRWGYYYMDVW |
| | | | | | | | | | GKGTRVTVSS |
| COVA2- | Ab | SARS-CoV2 | SARS-CoV1 | | SARS-CoV1, | S; non- | B-cells; SARS-CoV2 | 659 | EVQLVESGGGLVQPGGSLRLSCAASGFT |
| 03 | | | | | SARS-CoV2 | RBD | Human Patient | | FSSYSMNWVRQAPGKGLEWVSYISSSSS |
| | | | | | | | | | TIYYADSVKGRFTISRDNAKNSLYLQMNS |
| | | | | | | | | | LRAEDTAVYYCAREANSDFWSGYLGYFD |
| | | | | | | | | | YWGQGTLVTVSS |
| COVA2- | Ab | SARS-CoV2 | SARS-CoV1 | SARS-CoV2 | SARS-CoV1 | S; RBD | B-cells; SARS-CoV2 | 660 | QVQLVETGGGLIQPGGSLRLSCAASGFT |
| 04 | | | | | | | Human Patient | | VSSNYMSWVRQAPGKGLEWVSVIYSG |
| | | | | | | | | | GSTFYADSVKGRFTISRDNSKNTLYLQM |
| | | | | | | | | | NSLRAEDTAVYYCARDLERAGGMDVW |
| | | | | | | | | | GQGTMVTVSS |
| COVA2- | Ab | SARS-CoV2 | SARS-CoV1 | | SARS-CoV1, | S; RBD | B-cells; SARS-CoV2 | 661 | EVQLLESGAEVKKPGESLKISCKGSGYSF |
| 05 | | | | | SARS-CoV2 | | Human Patient | | TSYWIGWVRQMPGKGLEWMGIIYPGD |
| | | | | | | | | | SDTRYSPSFQGQVTISADKSISTAYLQWS |
| | | | | | | | | | SLKASDTAMYYCARHMRPSIAARPGYQ |
| | | | | | | | | | YYMDVWGKGTRVTVSS |
| COVA2- | Ab | SARS-CoV2 | SARS-CoV1 | SARS-CoV2 | SARS-CoV1 | S; RBD | B-cells; SARS-CoV2 | 662 | EVQLVETGGGLIQPGGSLRLSCAASGLT |
| 07 | | | | | | | Human Patient | | VSSNYMNWVRQAPGKGLEWVSVIYSG |
| | | | | | | | | | GSTYYADSVKGRFTISRDNSKNTLYLQM |
| | | | | | | | | | NSLRAEDTAVYYCAREAYGMDVWGQG |
| | | | | | | | | | TMVTVSS |
| COVA2- | Ab | SARS-CoV2 | SARS-CoV1 | | SARS-CoV1, | S; non- | B-cells; SARS-CoV2 | 663 | EVQLLESGGGLVQPGGSLKLSCAASGFT |
| 10 | | | | | SARS-CoV2 | RBD | Human Patient | | FSSYAMSWVRQAPGKGLEWVSAISGSG |
| | | | | | | | | | SNTYYADSVKGRFTISRDNSKNTLYLQM |
| | | | | | | | | | NSLRAEDTAVYYCAKGLRGQQLVIPTEY |
| | | | | | | | | | FQHWGQGTLVTVSS |
| COVA2- | Ab | SARS-CoV2 | SARS-CoV1 | SARS-CoV2 | SARS-CoV1 | S; RBD | B-cells; SARS-CoV2 | 664 | EVQLVESGAEVKKPGSSVKVSCKASGGT |
| 11 | | | | (weak) | | | Human Patient | | LSSYAISWVRQAPGQGLEWMGGIIPIFG |
| | | | | | | | | | TANYAQKFQGRVTITTDESTSTAYMELSS |
| | | | | | | | | | LRSEDTAVYYCARGPRGCSSTSCYGSYFD |
| | | | | | | | | | YWGQGTLVTVSS |
| COVA2- | Ab | SARS-CoV2 | SARS-CoV1 | | SARS-CoV1, | S; non- | B-cells; SARS-CoV2 | 665 | EVQLVESGGGLVKPGGSLRLSCAASGFT |
| 12 | | | | | SARS-CoV2 | RBD | Human Patient | | FGSYSMSWVRQAPGKGLEWVSSISRSS |
| | | | | | | | | | SYIYNADSVRGRLTISRDNAKNSLYLQM |
| | | | | | | | | | NSLRVEDTAVYYCARDQPLPDILTGYYT |
| | | | | | | | | | GPLDYWGQGTLVTVSS |
| COVA2- | Ab | SARS-CoV2 | SARS-CoV1 | SARS-CoV2 | SARS-CoV1 | S; RBD | B-cells; SARS-CoV2 | 666 | QVQLVETGGGLIQPGGSLRLSCAASGFT |
| 13 | | | | (weak) | | | Human Patient | | VSSNYMSWVRQAPGKGLEWVSVIYSG |
| | | | | | | | | | GSTYYADSVKGRFTISRDNSKNTLYLQM |
| | | | | | | | | | NSLRAEDTAVYYCARDLDTMGGMDVW |
| | | | | | | | | | GQGTRVTVSS |
| COVA2- | Ab | SARS-CoV1, | | | SARS-CoV1, | S; non- | B-cells; SARS-CoV2 | 667 | QVQLVQSGAEVKKPGSSVKVSCKASGG |
| 14 | | SARS-CoV2 | | | SARS-CoV2 | RBD | Human Patient | | TFSSYAIIWVRQAPGQGLEWMGGIIPIF |
| | | | | | | | | | GTANYAQKFQGRVTITTDESTSTAYMEL |
| | | | | | | | | | SSLRSEDTAVYYCARVRYYDSSGYYEDY |
| | | | | | | | | | WGQGTLVTVSS |
| COVA2- | Ab | SARS-CoV2 | SARS-CoV1 | SARS-CoV2 | SARS-CoV1 | S; RBD | B-cells; SARS-CoV2 | 668 | QVQLLESGGGLVQPGGSLRLSCAASGFT |
| 15 | | | | | | | Human Patient | | FSSYAMSWVRQAPGKGLEWASAISGSG |
| | | | | | | | | | GSTYYADSVEGRFTISRDNSKNTLYLQM |
| | | | | | | | | | NSLRAEDTAVYYCAKDTGYCGDDCYIKLI |
| | | | | | | | | | RGGPDYWGQGTLVTVSS |
| COVA2- | Ab | SARS-CoV2 | SARS-CoV1 | | SARS-CoV1, | S; RBD | B-cells; SARS-CoV2 | 669 | QVQLVQSGAEVKKPGATVKISCKVSGYT |
| 16 | | | | | SARS-CoV2 | | Human Patient | | FTDYYMHWVQQAPGKGLEWMGLVDP |
| | | | | | | | | | EDGETIYAEKFQGRVTITADTSTDTAYM |
| | | | | | | | | | ELSSLRSEDTAVYYCASSDSSGFVGSRGF |
| | | | | | | | | | DYWGQGTRVTVSS |
| COVA2- | Ab | SARS-CoV2 | SARS-CoV1 | | SARS-CoV1, | S; RBD | B-cells; SARS-CoV2 | 670 | QVQLVESGAEVKKPGSSVKVSCKASGGT |
| 17 | | | | | SARS-CoV2 | | Human Patient | | FSSYGINWVRQAPGQGLEWMGGIIPIF |
| | | | | | | | | | GTANYAQKFQGRVTITTDESTSTAYMEL |
| | | | | | | | | | SSLRSEDTAVYYCASFGDDSGDEGVRW |
| | | | | | | | | | GQGTLVTVSS |
| COVA2- | Ab | SARS-CoV1, | | SARS-CoV2 | SARS-CoV1 | S; non- | B-cells; SARS-CoV2 | 671 | EVQLVQSGAEVKKPGSSVKVSCKASGGT |
| 18 | | SARS-CoV2 | | | | RBD | Human Patient | | FSSYAISWVRQAPGQGLEWMGGIIPIFG |
| | | | | | | | | | TTNYAQKFQGRVTITTDESTSTAYMELSS |
| | | | | | | | | | LRSEDTAVYYCARVYSYDSSGYYLEYWG |
| | | | | | | | | | QGTRVTVSS |
| COVA2- | Ab | SARS-CoV2 | SARS-CoV1 | | SARS-CoV1, | S; RBD | B-cells; SARS-CoV2 | 672 | EVQLVESGGGLIQPGGSLRLSCAASGFT |
| 20 | | | | | SARS-CoV2 | | Human Patient | | VSSNYMSWVRQAPGKGLEWVSVIYSG |
| | | | | | | | | | GSTYYADSVKGRFTISRDNSKNTLYLQM |
| | | | | | | | | | NSLRAEDTAVYYCASPLLLTPPDYYYYMD |
| | | | | | | | | | VWGKGTMVTVSS |
| COVA2- | Ab | SARS-CoV2 | SARS-CoV1 | | SARS-CoV1, | S; non- | B-cells; SARS-CoV2 | 673 | EVQLVESGPGLVKPSETLSLTCTVSGGSI |
| 22 | | | | | SARS-CoV2 | RBD | Human Patient | | SSYYWSWIRQPAGKGLEWIGRIYTSGST |
| | | | | | | | | | NYNPSLKSRVTMSVDTSKNQFSLKLSSV |
| | | | | | | | | | TAADTAVYYCARWKYNDRFDYWGQGT |
| | | | | | | | | | RVTVSS |
| COVA2- | Ab | SARS-CoV2 | SARS-CoV1 | | SARS-CoV1, | S; RBD | B-cells; SARS-CoV2 | 674 | EVQLVESGAEVKKPGSSVKVSCKASGGT |
| 23 | | | | | SARS-CoV2 | | Human Patient | | FSSYAISWVRQAPGQGLEWMGGIIPIFG |
| | | | | | | | | | TANYAQKFQGRVTITTDESTSTAYMELSS |
| | | | | | | | | | LRSEDTAVYYCARGPRYCSSTSCYAGVYF |
| | | | | | | | | | DYWGQGTRVTVSS |
| COVA2- | Ab | SARS-CoV2 | SARS-CoV1 | | SARS-CoV1, | S; RBD | B-cells; SARS-CoV2 | 675 | EVQLVQSGAEVKKPGESLRISCKGSGYSF |
| 24 | | | | | SARS-CoV2 | | Human Patient | | TSYWISWVRQMPGKGLEWMGRIDPSD |
| | | | | | | | | | SYTNYSPSFQGHVTISADKSISTAYLQWS |
| | | | | | | | | | SLKASDTAMYYCARPNPAGGYDSSGWV |
| | | | | | | | | | DAFDIWGQGTRVTVSS |
| COVA2- | Ab | SARS-CoV2 | SARS-CoV1 | | SARS-CoV1, | S; non- | B-cells; SARS-CoV2 | 676 | EVQLVESGAEVKKPGASVKVSCKVSGYT |
| 25 | | | | | SARS-CoV2 | RBD | Human Patient | | LPELSMHWVRQTPGKGLEWMGGFDP |
| | | | | | | | | | EDGETIYAQKFQGRVTMTEDTSTDTAY |
| | | | | | | | | | MELSSLRSEDTAVYYCATGPTIAAAATN |
| | | | | | | | | | WFDPGGQGTLVTVSS |
| COVA2- | Ab | SARS-CoV2 | SARS-CoV1 | | SARS-CoV1, | S; non- | B-cells; SARS-CoV2 | 677 | EVQLVESGGGLVKPGGSLRLSCAASGFT |
| 26 | | | | | SARS-CoV2 | RBD | Human Patient | | FSNAWMSWVRQAPGKGLEWVGRIKSK |
| | | | | | | | | | TDGGTTDYAAPVKGRFTISRDDSKNTLY |
| | | | | | | | | | LQMNSLKTEDTAVYYCTTDRGDSYGYYY |
| | | | | | | | | | CMDVWGKGTRVTVSS |
| COVA2- | Ab | SARS-CoV2 | SARS-CoV1 | | SARS-CoV1, | S; non- | B-cells; SARS-CoV2 | 678 | EVQLVESGGGVVQPGRSLRLSCAASGFT |
| 28 | | | | | SARS-CoV2 | RBD | Human Patient | | FSSYGMHWVRQAPGKGLEWVAVIWY |
| | | | | | | | | | DGSNKYYADSVKGRFTISRDNSKNTLYL |
| | | | | | | | | | QMDSLRAEDTAMYYCAKDKAPPCSSG |
| | | | | | | | | | WYYFDYWGQGTLVTVSS |
| COVA2- | Ab | SARS-CoV2 | SARS-CoV1 | SARS-CoV2 | SARS-CoV1 | S; RBD | B-cells; SARS-CoV2 | 679 | EVQLVESGGGVVQPGRSLRLSCAASGFT |
| 29 | | | | | | | Human Patient | | FSSYTMHWVRQAPGKGLEWVAVISYD |
| | | | | | | | | | GSNKYYADSVKGRFTISRDNSKNTLYLQ |
| | | | | | | | | | MNSLRAEDTAVYYCASLPVVPAAIGPLP |
| | | | | | | | | | AFDIWGQGTMVTVSS |
| COVA2- | Ab | SARS-CoV2 | SARS-CoV1 | | SARS-CoV1, | S; non- | B-cells; SARS-CoV2 | 680 | EVQLVESGPGLVKPSQTLSLTCTVSGGSI |
| 30 | | | | | SARS-CoV2 | RBD | Human Patient | | SSGDYYWSWIRQPPGKGLEWIGYIYYSG |
| | | | | | | | | | STYYNPSLKSRVTISVDTSKNQFSLKLSS |
| | | | | | | | | | VTAADTAVYYCARGVEDPVVPAAIPWCW |
| | | | | | | | | | FDPWGQGTRVTVSS |
| COVA2- | Ab | SARS-CoV2 | SARS-CoV1 | | SARS-CoV1, | S; RBD | B-cells; SARS-CoV2 | 681 | EVQLVESGVEVKKPGASVKVSCKAFGYT |
| 31 | | | | | SARS-CoV2 | | Human Patient | | FTGQDMHWVRQAPGQGLEWMGWIN |
| | | | | | | | | | PSSAGTNYAQKFQGRVTMTRDTSISTAY |
| | | | | | | | | | MELSRLRSDDTSVYYCRKMLTIFGKVNQ |
| | | | | | | | | | TMLLISGAKGQWSPSLQWGQGTMVTV |
| | | | | | | | | | SS |
| COVA2- | Ab | SARS-CoV1, | | | SARS-CoV1, | S; RBD | B-cells; SARS-CoV2 | 682 | EVQLVESGAEVKKPGSSVKVSCKASGGT |
| 32 | | SARS-CoV2 | | | SARS-CoV2 | | Human Patient | | FSSYAISWVRQAPGQGLEWMGGIIPIFG |
| | | | | | | | | | TANYAQKFQGRATITTDESTSTAYMELSS |
| | | | | | | | | | LGSEDTAVYYCARTHSYDNSGQYFDYW |
| | | | | | | | | | GQGTMVTVSS |
| COVA2- | Ab | SARS-CoV2 | SARS-CoV1 | | SARS-CoV1, | S; non- | B-cells; SARS-CoV2 | 683 | QVQLVQSGAEVKKPGESLRISCKGSGYS |
| 33 | | | | | SARS-CoV2 | RBD | Human Patient | | FTSHWISWVRQMPGKGLEWMGRIDPS |
| | | | | | | | | | DSYTNYSPSFQGHVTISADKSISTAYLQW |
| | | | | | | | | | SSLKASDTAMYYCARLKVITIFGVVRDDY |
| | | | | | | | | | GMDVWGQGTTVTVSS |
| COVA2- | Ab | SARS-CoV2 | SARS-CoV1 | | SARS-CoV1, | S; non- | B-cells; SARS-CoV2 | 684 | QVQLVESGGGVVQPGRSLRLSCAASGF |
| 34 | | | | | SARS-CoV2 | RBD | Human Patient | | TFSSYAMHWVRQAPGKGLEWVAVISY |
| | | | | | | | | | DGSNKYYADSVKGRFTISRDNSKNTLYL |
| | | | | | | | | | QMNSLRAEDTAVYYCARSASGSYYGAF |
| | | | | | | | | | DYWGQGTLVTVSS |
| COVA2- | Ab | SARS-CoV2 | SARS-CoV1 | | SARS-CoV1, | S; non- | B-cells; SARS-CoV2 | 685 | EVQLVESGAEVKKPGASVKVSCKVSGYT |
| 37 | | | | | SARS-CoV2 | RBD | Human Patient | | LPELSMHWVRQAPGKGLDWMGGFDP |
| | | | | | | | | | EDGETIYAQKFQGRVTMTEDTSTDTAY |
| | | | | | | | | | MELSSLRSEDTAVYYCATSPAVMSVGW |
| | | | | | | | | | VDPWGQGTLVTVSS |
| COVA2- | Ab | SARS-CoV2 | SARS-CoV1 | | SARS-CoV1, | S; non- | B-cells; SARS-CoV2 | 686 | QVQLQQSGPGLVKPSETLPLTCTVSGGS |
| 38 | | | | | SARS-CoV2 | RBD | Human Patient | | ISSSSYYWGWIRQPPGKGLEWIGSVFYS |
| | | | | | | | | | GSTYYNPSLKSRVTISVDTSKNQLSLKLS |
| | | | | | | | | | SVTAADTAVYYCARQVRQWLEDDAFDI |
| | | | | | | | | | WGQGTMVTVSS |
| COVA2- | Ab | SARS-CoV2 | SARS-CoV1 | | SARS-CoV1, | S; RBD | B-cells; SARS-CoV2 | 687 | QVQLVETGGGLIQPGGSLRLSCAASGFT |
| 39 | | | | | SARS-CoV2 | | Human Patient | | VSSNYMSWVRQAPGKGLEWVSVIYTG |
| | | | | | | | | | GTTYYADSVKGRFTISRDNSKNTLYLQM |
| | | | | | | | | | NSLRAEDTAVYYCARAHVDTAMVESGA |
| | | | | | | | | | FDIWGQGTRVTVSS |
| COVA2- | Ab | SARS-CoV2 | SARS-CoV1 | | SARS-CoV1, | S; non- | B-cells; SARS-CoV2 | 688 | QVQLQESGPGLVKPSGTLSLTCAVSGGS |
| 40 | | | | | SARS-CoV2 | RBD | Human Patient | | ISSSNWWSWVRQPPGKGLEWIGEIYHS |
| | | | | | | | | | GSSNYNPSLKSRVTISVDKSKNQFSLKLN |
| | | | | | | | | | SVTAADTAVYYCAGRYCSGGRCGWFDP |
| | | | | | | | | | WGQGTLVTVSS |
| COVA2- | Ab | SARS-CoV2 | SARS-CoV1 | | SARS-CoV1, | S; non- | B-cells; SARS-CoV2 | 689 | EVQLVESGGGLVKPGGSLRLSCSASGFT |
| 41 | | | | | SARS-CoV2 | RBD | Human Patient | | FSNYNMDWVRQAPGKGLEWVSSISSSS |
| | | | | | | | | | SYIYLADSVKGRFTISRDNAKNSLYLQMN |
| | | | | | | | | | SLRAEDTAVYYCARVQKDIVVVPVALAD |
| | | | | | | | | | YYYYGMDVWGQGTTVTVSS |
| COVA2- | Ab | SARS-CoV2 | SARS-CoV1 | | SARS-CoV1, | S; non- | B-cells; SARS-CoV2 | 690 | QVQLVQPGAEVKKPGASVKVSCKASGY |
| 43 | | | | | SARS-CoV2 | RBD | Human Patient | | TFTSYGISWVRQAPGQGLEWMGWISA |
| | | | | | | | | | YNGDTNYAQKLQGRVTMTTDTSTSTAY |
| | | | | | | | | | MELRSLKSDDTAVYYCARFDYGYPYSSW |
| | | | | | | | | | SVLSIDYWGQGTLVTVSS |
| COVA2- | Ab | SARS-CoV1, | | | SARS-CoV1, | S; RBD | B-cells; SARS-CoV2 | 691 | EVQLVESGGGVVQPGRSLRLSCAASGFT |
| 44 | | SARS-CoV2 | | | SARS-CoV2 | | Human Patient | | FSSYAMHWVRQAPGKGLEWVAVISYD |
| | | | | | | | | | GSYKYYADSVKGRFTISRDNSKNTLYLQ |
| | | | | | | | | | MNSLTAEDTAVYYCAREGSRQWLVIYF |
| | | | | | | | | | DYWGQGTLVTVSS |
| COVA2- | Ab | SARS-CoV2 | | | SARS-CoV1, | S; RBD | B-cells; SARS-CoV2 | 692 | EVQLLESGAEVKKPGASVKISCKASGYTF |
| 45 | | | | | SARS-CoV2 | | Human Patient | | TGYYMHWVRQAPGQGLEWMGWINP |
| | | | | | | | | | NSGGTNYAQKFQGRVTMTRDTSISTAY |
| | | | | | | | | | MELSRLRSDDTAVYYCARGDGDYYDSS |
| | | | | | | | | | GYYRPTLYNWLDPWGQGTRVTVSS |
| COVA2- | Ab | SARS-CoV2 | SARS-CoV1 | | SARS-CoV1, | S; RBD | B-cells; SARS-CoV2 | 693 | QVQLQESGPGLVKPSETLSLTCTASGGSI |
| 46 | | | | | SARS-CoV2 | | Human Patient | | SSSSYYWGWIRQPPGKGLEWIGSIYYSG |
| | | | | | | | | | STYYNPSLKSRVTISVDTSKNQFSLKLSS |
| | | | | | | | | | VTAADTAVYYCARHPSGLYQLLNWGQGT |
| | | | | | | | | | LVTVSS |
| COVA2- | Ab | SARS-CoV2 | SARS-CoV1 | | SARS-CoV1, | S; non- | B-cells; SARS-CoV2 | 694 | EVQLVESGGGLVQPGRSLRLSCAASGFT |
| 47 | | | | | SARS-CoV2 | RBD | Human Patient | | FDDYAMHWVRQAPGKGLEWVSGISW |
| | | | | | | | | | NSGSIGYADSVKGRFTISRDSAKNSLYLQ |
| | | | | | | | | | MNSLRAEDTALYYCAKVATYYYDRSGYY |
| | | | | | | | | | YGGALDYWGQGTLVTVSS |
| COVA3- | Ab | SARS-CoV1, | | | SARS-CoV1, | S; non- | B-cells; SARS-CoV2 | 695 | EVQLVESGPGLVKPSETLSLTCTVSGGSI |
| 01 | | SARS-CoV2 | | | SARS-CoV2 | RBD | Human Patient | | SSYYWSWIRQPPGKGLEWIGYIYYSGST |
| | | | | | | | | | NYNPSLKSRVTISVDTSKNQFSLKLSSVT |
| | | | | | | | | | AADTAVYYCARGPAATYYYYMDVWGKG |
| | | | | | | | | | TRVTVSS |
| COVA3- | Ab | SARS-CoV1, | | | SARS-CoV1, | S; non- | B-cells; SARS-CoV2 | 696 | EVQLVESGGGLVQPGGSLRLSCAASGFT |
| 03 | | SARS-CoV2 | | | SARS-CoV2 | RBD | Human Patient | | FSSYAMSWVRQAPGKGLEWVSTISGSG |
| | | | | | | | | | GNTYYADSVKGRFTISRDNSKNTLYLQM |
| | | | | | | | | | NSLRAEDTAVYYCAKEIAVAGCFDYWG |
| | | | | | | | | | QGTLVTVSS |
| COVA3- | Ab | SARS-CoV2 | SARS-CoV1 | | SARS-CoV1, | S; non- | B-cells; SARS-CoV2 | 697 | EVQLVESGGGVVQPGRSLRLSCAASGFT |
| 04 | | | | | SARS-CoV2 | RBD | Human Patient | | FSSYGMHWVRQAPGKGLEWVAVIWY |
| | | | | | | | | | DGSNKYYADSVKGRFTISRDNSKNTLYL |
| | | | | | | | | | QMNSLRAEDTAVYYCARVGSVKSTAGY |
| | | | | | | | | | DFWSGDPFDYWGQGTLVTVSS |
| COVA3- | Ab | SARS-CoV2 | SARS-CoV1 | | SARS-CoV1, | S; RBD | B-cells; SARS-CoV2 | 698 | QVQLVQSGAEVKKPGASVKVSCKVSGY |
| 05 | | | | | SARS-CoV2 | | Human Patient | | TLTELSMHWVRQAPGKGLEWMGGFD |
| | | | | | | | | | PEDGETIYAQKFQGRVTMTEDTSTDTAY |
| | | | | | | | | | MELSSLRSEDTAVYYCATAYSVDTAMVR |
| | | | | | | | | | GVGYWGQGTLVTVSS |
| COVA3- | Ab | SARS-CoV2 | SARS-CoV1 | | SARS-CoV1, | S; RBD | B-cells; SARS-CoV2 | 699 | QVQLVESRAEVKKPGSSVKVSCKASGGT |
| 06 | | | | | SARS-CoV2 | | Human Patient | | FSSYAISWVRQAPGQGLEWMGRIIPILG |
| | | | | | | | | | ITNYAQKFQGRVTITADKSTSTAYMELSS |
| | | | | | | | | | LRSEDTAVYYCARDAPDYYDSSGPTYFD |
| | | | | | | | | | YWGQGTLVTVSS |
| COVA3- | Ab | SARS-CoV2 | SARS-CoV1 | | SARS-CoV1, | S; non- | B-cells; SARS-CoV2 | 700 | QVQLVESGGGLVQPGRSLRLSCAASGFT |
| 07 | | | | | SARS-CoV2 | RBD | Human Patient | | FDDYAMHWVRQAPGKGLEWVSGISW |
| | | | | | | | | | NSGSIGYADSVKGRFTISRDNAKNSLYLQ |
| | | | | | | | | | MNSLRAEDTALYYCAKAEPEVGGYDYY |
| | | | | | | | | | MDVWGKGTMVTVSS |
| COVA3- | Ab | SARS-CoV1, | | | SARS-CoV1, | S; non- | B-cells; SARS-CoV2 | 701 | EVQLVESGPGLVKPSETLSLTCTVSGGSI |
| 08 | | SARS-CoV2 | | | SARS-CoV2 | RBD | Human Patient | | SSYYWSWIRQPPGKGLEWIGYIYYSGST |
| | | | | | | | | | NYNPSLKSRVTISVDTSKNQFSLRLSSVT |
| | | | | | | | | | AADTAVYYCARGPAATYYYYMDVWGK |
| | | | | | | | | | GTMVTVSS |
| COVA3- | Ab | SARS-CoV2 | SARS-CoV1 | | SARS-CoV1, | S; RBD | B-cells; SARS-CoV2 | 702 | EVQLVESGGGLVQPGRSLRLSCAASGFT |
| 09 | | | | | SARS-CoV2 | | Human Patient | | FDDYAMHWVRQAPGKGLEWVSGISW |
| | | | | | | | | | NSGSIGYADSVKGRFTISRDNAKNSLYLQ |
| | | | | | | | | | MNSLRAEDTALYYCAKMGPDPAHDYG |
| | | | | | | | | | RKNDAFDIWGQGTMVTVSS |
| COVA3- | Ab | SARS-CoV1, | | | SARS-CoV1, | S; RBD | B-cells; SARS-CoV2 | 703 | EVQLVESRAEMKKPGESLKISCKGSGYTF |
| 10 | | SARS-CoV2 | | | SARS-CoV2 | | Human Patient | | TNHWIAWVRQMPGKGLEWMGIIYPG |
| | | | | | | | | | DSDTRYSPSFEGQVTISADKSISTAYLQW |
| | | | | | | | | | SSLKASDTAMYYCARRGYTYGADFYGLD |
| | | | | | | | | | VWGQGTRVTVSS |
| CR3022 | Ab | SARS-CoV1, | | SARS-CoV1 | SARS-CoV2 | S; RBD | B-cells; SARS-CoV1 | 704 | QMQLVQSGTEVKKPGESLKISCKGSGY |
| | | SARS-CoV2 | | | | | Human Patient | | GFITYWIGWVRQMPGKGLEWMGIIYP |
| | | | | | | | | | GDSETRYSPSFQGQVTISADKSINTAYLQ |
| | | | | | | | | | WSSLKASDTAIYYCAGGSGISTPMDVW |
| | | | | | | | | | GQGTTVTVSS |
| CV-X1- | Ab | SARS-CoV2 | SARS-CoV1 | SARS-CoV2 | | S; RBD | B-cells; SARS-CoV2 | | ND |
| 126 | | | | | | | Human Patient | | |
| CV-X2- | Ab | SARS-CoV2 | SARS-CoV1 | SARS-CoV2 | | S; RBD | B-cells; SARS-CoV2 | | ND |
| 106 | | | | | | | Human Patient | | |
| CV05-163 | Ab | SARS-CoV2 | SARS-CoV1 | SARS-CoV2 | | S; RBD | B-cells; SARS-CoV2 | | ND |
| | | | | | | | Human Patient | | |
| CV07-200 | Ab | SARS-CoV2 | SARS-CoV1 | SARS-CoV2 | | S; RBD | B-cells; SARS-CoV2 | | ND |
| | | | | | | | Human Patient | | |
| CV07-209 | Ab | SARS-CoV2 | SARS-CoV1 | SARS-CoV2 | | S; RBD | B-cells; SARS-CoV2 | | ND |
| | | | | | | | Human Patient | | |
| CV07-222 | Ab | SARS-CoV2 | SARS-CoV1 | SARS-CoV2 | | S; RBD | B-cells; SARS-CoV2 | | ND |
| | | | | | | | Human Patient | | |
| CV07-250 | Ab | SARS-CoV2 | SARS-CoV1 | SARS-CoV2 | | S; RBD | B-cells; SARS-CoV2 | | ND |
| | | | | | | | Human Patient | | |
| CV07-255 | Ab | SARS-CoV2 | SARS-CoV1 | SARS-CoV2 | | S; RBD | B-cells; SARS-CoV2 | | ND |
| | | | | | | | Human Patient | | |
| CV07-262 | Ab | SARS-CoV2 | SARS-CoV1 | SARS-CoV2 | | S; RBD | B-cells; SARS-CoV2 | | ND |
| | | | | | | | Human Patient | | |
| CV07-270 | Ab | SARS-CoV2 | SARS-CoV1 | SARS-CoV2 | | S; RBD | B-cells; SARS-CoV2 | | ND |
| | | | | | | | Human Patient | | |
| CV07-283 | Ab | SARS-CoV2 | SARS-CoV1 | SARS-CoV2 | | S; RBD | B-cells; SARS-CoV2 | | ND |
| | | | | | | | Human Patient | | |
| CV07-287 | Ab | SARS-CoV2 | SARS-CoV1 | SARS-CoV2 | | S; RBD | B-cells; SARS-CoV2 | | ND |
| | | | | | | | Human Patient | | |
| CV07-315 | Ab | SARS-CoV2 | SARS-CoV1 | SARS-CoV2 | | S; RBD | B-cells; SARS-CoV2 | | ND |
| | | | | | | | Human Patient | | |
| CV1 | Ab | SARS-CoV1, | | SARS-CoV2 | | S; non- | B-cells; SARS-CoV2 | 705 | QVQLQESGPGLVKPSETLSLTCTVSGYSI |
| | | SARS-CoV2 | | | | RBD | Human Patient | | SSGYYWGWIRQPPGKGLEWIGSIYHSG |
| | | | | | | | | | STYYNPSLKSRVTISVDTSKNQFSLKLSS |
| | | | | | | | | | VTAADTAVYYCARTPLSLRLRYNWYFDLW |
| | | | | | | | | | GRGTLVTVSS |
| CV10 | Ab | SARS-CoV1, | | | SARS-CoV2 | S; non- | B-cells; SARS-CoV2 | 706 | QVQLQESGPGLVKPSETLSLTCNVSGGSI |
| | | SARS-CoV2 | | | | RBD | Human Patient | | SSYYWSWIRQPPGKGLEWIGYIYYSGST |
| | | | | | | | | | NYNPSLKSRVTISVDTSKNQFSLKLSSVT |
| | | | | | | | | | AADTAVYYCARGFDYWGQGTLVTVSS |
| CV11 | Ab | SARS-CoV1, | | | SARS-CoV2 | S; non- | B-cells; SARS-CoV2 | 707 | QVQLQESGPGLVKPSQTLSLTCTVSGGSI |
| | | SARS-CoV2 | | | | RBD | Human Patient | | SSGGYYWSWIRQHPGKGLEWIGYIYYS |
| | | | | | | | | | GSTYYNPSLKSRVTISVDTSKNQFSLKLS |
| | | | | | | | | | SVTAADTAVYYCARETTGHFDYWGQGTL |
| | | | | | | | | | VTVSS |
| CV12 | Ab | SARS-CoV2 | SARS-CoV1 | | SARS-CoV2 | S; non- | B-cells; SARS-CoV2 | 708 | QVQLVESGGGVVQPGRSLRLSCAASGF |
| | | | | | | RBD | Human Patient | | NLSNYAMHWVRQASGKGLEWVSLISY |
| | | | | | | | | | DGSVKYYTDSVKGRFTVSGDNSKNTLFL |
| | | | | | | | | | QMNSLRPDDSALYYCVRGGVSGPNSFD |
| | | | | | | | | | MWGQGTTVTVSS |
| CV13 | Ab | SARS-CoV1, | | | SARS-CoV2 | S; non- | B-cells; SARS-CoV2 | 709 | QVQLVQSGSELKKPGASVKLSCQASGYS |
| | | SARS-CoV2 | | | | RBD | Human Patient | | FTNHAMNWVRQAPGQGLEWMGWIN |
| | | | | | | | | | TNTGNPTYAQGFTGRFVFSLDTSVSTTYL |
| | | | | | | | | | HISSLKAEDTAVYYCARASARPGVATNL |
| | | | | | | | | | DFWGQGTLVVVSS |
| CV15 | Ab | SARS-CoV2 | SARS-CoV1 | | SARS-CoV2 | S; non- | B-cells; SARS-CoV2 | 710 | EVQLVESGGGLVQPGGSLRLSCAASGFT |
| | | | | | | RBD | Human Patient | | FSSYWMSWVRQAPGKGLEWVANIKQ |
| | | | | | | | | | DGSEKYYVDSVKGRFTISRDNAKNSLYL |
| | | | | | | | | | QMNSLRAEDTAVYYCARDFNSYQLLWY |
| | | | | | | | | | YYYGMDVWGQGTTVTVSS |
| CV16 | Ab | SARS-CoV2 | SARS-CoV1 | | SARS-CoV2 | S; non- | B-cells; SARS-CoV2 | 711 | EVQLVQSGAEVKKPGESLKISCKGSGYSF |
| | | | | | | RBD | Human Patient | | TSYWIGWVRQMPGKGLEWMGIIYPGD |
| | | | | | | | | | SDTRYSPSFQGQVTISADKSISTAYLQWS |
| | | | | | | | | | SLKASDTAMYYCARQSSFYSSGWYSYG |
| | | | | | | | | | MDVWGQGTTVTVSS |
| CV17 | Ab | SARS-CoV2 | SARS-CoV1 | | SARS-CoV2 | S; non- | B-cells; SARS-CoV2 | 712 | QVQLVQSGAEVKKPGASVKVSCKASGY |
| | | | | | | RBD | Human Patient | | TFTGYYMHWVRQAPGQGLEWMGWI |
| | | | | | | | | | NPNSGGTNYAQKFQGRVTMTRDTSIST |
| | | | | | | | | | AYMELSRLRSDDTAVYYCARVDYGSGSY |
| | | | | | | | | | GWGWFDPWGQGTLVTVSS |
| CV18 | Ab | SARS-CoV1, | | | SARS-CoV2 | S; non- | B-cells; SARS-CoV2 | 713 | QVQLVQSGAEVKKPGASVKVSCKVSGY |
| | | SARS-CoV2 | | | | RBD | Human Patient | | TLTELSMHWVRQAPGKGLEWMGGFD |
| | | | | | | | | | PEDGETIYAQKFQGRVTMTEDTSTDTAY |
| | | | | | | | | | MELSSLRSEDTAVYYCATTSPIVGAITWF |
| | | | | | | | | | DPWGQGTLVTVSS |
| CV19 | Ab | SARS-CoV2 | SARS-CoV1 | | SARS-CoV2 | S; non- | B-cells; SARS-CoV2 | 714 | QVQLVQSGAEVKKPGASVKVSCKASGY |
| | | | | | | RBD | Human Patient | | TFTGYYMHWVRQAPGQGLEWMGWI |
| | | | | | | | | | NPNSGGTNYAQKFQGRVTMTRDTSIST |
| | | | | | | | | | AYMELSRLRSDDTAVYYCAREYYYDSSVY |
| | | | | | | | | | PYYYYAMDVWGQGTTVTVSS |
| CV2 | Ab | SARS-CoV2 | SARS-CoV1 | | SARS-CoV2 | S; non- | B-cells; SARS-CoV2 | 715 | QVQLVESGGGVVQPGRSLRLSCAASGF |
| | | | | | | RBD | Human Patient | | TFSSYAMHWVRQAPGKGLEWVAVISY |
| | | | | | | | | | DGSNKYYADSVKGRFTISRDNSKNTLYL |
| | | | | | | | | | QMNSLRAEDTAVYYCARVRGSYYLFDY |
| | | | | | | | | | WGQGTLVTVSS |
| CV21 | Ab | SARS-CoV2 | SARS-CoV1 | | SARS-CoV2 | S; non- | B-cells; SARS-CoV2 | 716 | EVQLVESGGGLVKPGGSLRLSCAASGFT |
| | | | | | | RBD | Human Patient | | FSNAWMSWVRQAPGKGLEWVGRIKSK |
| | | | | | | | | | TDGGTTDYAAPVKGRFTISRDDSKNTLY |
| | | | | | | | | | LQMNSLKTEDTAVYYCTTDRVYDYIWGS |
| | | | | | | | | | YRYLDYWGQGTLVTVSS |
| CV22 | Ab | SARS-CoV1, | | | SARS-CoV2 | S; non- | B-cells; SARS-CoV2 | 717 | EVQLVESGGGLVKPGGSLRLSCAASGFT |
| | | SARS-CoV2 | | | | RBD | Human Patient | | FSSYSMNWVRQAPGKGLEWVSSISSSSS |
| | | | | | | | | | YIYYADSVKGRFTISRDNAKNSLYLQMNS |
| | | | | | | | | | LRAEDTAVYYCARDRESYDILTGYSMEG |
| | | | | | | | | | CFDYWGQGTLVTVSS |
| CV23 | Ab | SARS-CoV2 | SARS-CoV1 | | SARS-CoV2 | S; non- | B-cells; SARS-CoV2 | 718 | QVQLVQSGAEVKKPGASVKVSCKASGY |
| | | | | | | RBD | Human Patient | | TFTSYAMHWVRQAPGQRLEWMGWIN |
| | | | | | | | | | AGNGNTKYSQKFQGRVTITRDTSASTAY |
| | | | | | | | | | MELSSLRSEDTAVYYCARVWGYCSGGS |
| | | | | | | | | | CYVDAFDIWGQGTMVTVSS |
| CV24 | Ab | SARS-CoV2 | SARS-CoV1 | | SARS-CoV2 | S; non- | B-cells; SARS-CoV2 | 719 | QVQLVQSGAEVKKPGASVKVSCKVSGY |
| | | | | | | RBD | Human Patient | | TLTELSMHWVRQAPGKGLEWMGGFD |
| | | | | | | | | | PEDGETIYAQKFQGRVTMTEDTSTDTAY |
| | | | | | | | | | MELSSLRSEDTAVYYCATAPPYSPPSSWF |
| | | | | | | | | | DPWGQGTLVTVSS |
| CV25 | Ab | SARS-CoV2 | SARS-CoV1 | | SARS-CoV2 | S; non- | B-cells; SARS-CoV2 | 720 | QVQLQESGPGLVKPSQTLSLTCTVSGGSI |
| | | | | | | RBD | Human Patient | | SSGDYYWSWIRQPPGKGLEWIGYIYYSG |
| | | | | | | | | | STYYNPSLKSRVTISVDTSKNQFSLKLSS |
| | | | | | | | | | VTAADTAVYYCARDHHYDFWSGYSSYYYY |
| | | | | | | | | | GMDVWGQGTTVTVSS |
| CV26 | Ab | SARS-CoV1, | | | SARS-CoV2 | S; non- | B-cells; SARS-CoV2 | 721 | QVQLVESGGGVVQPGRSLRLSCAASGF |
| | | SARS-CoV2 | | | | RBD | Human Patient | | TFSSYAMHWVRQAPGKGLEWVAVISY |
| | | | | | | | | | DGSNKYYADSVKGRFTISRDNSKNTLYL |
| | | | | | | | | | QMNSLRAEDTAVYYCARDEAYYDILTGY |
| | | | | | | | | | INAPKNYYYYGMDVWGQGTTVTVSS |
| CV27 | Ab | SARS-CoV2 | SARS-CoV1 | | SARS-CoV2 | S; non- | B-cells; SARS-CoV2 | 722 | QVQLVESGGGVVQPGRSLRLSCAASGF |
| | | | | | | RBD | Human Patient | | TFSSYAMHWVRQAPGKGLEWVALISYD |
| | | | | | | | | | GSNKYYADSVKGRFTISRDNSKNTLYLQ |
| | | | | | | | | | MNSLRAEDTAVYYCARSFGGSYYYGMD |
| | | | | | | | | | VWGQGTTVTVSS |
| CV3 | Ab | SARS-CoV1, | | | SARS-CoV2 | S; non- | B-cells; SARS-CoV2 | 723 | QVQLVQSGSELKKPGASVKLSCQASGYS |
| | | SARS-CoV2 | | | | RBD | Human Patient | | FTNHAMNWVRQAPGQGLEWMGWIN |
| | | | | | | | | | TNTGNPTYAQGFTGRFVFSLDTSVSTTYL |
| | | | | | | | | | HISSLKAEDTAVYYCARASARPGVATNL |
| | | | | | | | | | DFWGQGTLVVVSS |
| CV30 | Ab | SARS-CoV2 | SARS-CoV1 | SARS-CoV2 | | S; RBD | B-cells; SARS-CoV2 | 724 | EVQLVESGGGLIQPGGSLRLSCAASGVI |
| | | | | | | | Human Patient | | VSSNYMSWVRQAPGKGLEWVSVIYSG |
| | | | | | | | | | GSTYYADSVKGRFTISRDNSKNTLYLQM |
| | | | | | | | | | NSLRAEDTAVYYCARDLDVSGGMDVW |
| | | | | | | | | | GQGTTVTVSS |
| CV31 | Ab | SARS-CoV1, | | | SARS-CoV2 | S; non- | B-cells; SARS-CoV2 | 725 | QVQLVQSGAEVKKPGASVKVSCKVSGY |
| | | SARS-CoV2 | | | | RBD | Human Patient | | TLTELSMHWVRQAPGKGLEWMGGFD |
| | | | | | | | | | PEDGETIYAQKFQGRVTMTEDTSTDTAY |
| | | | | | | | | | MELSSLRSEDTAVYYCATAPPYSPPSSWF |
| | | | | | | | | | DPWGQGTLVTVSS |
| CV32 | Ab | SARS-CoV2 | SARS-CoV1 | | SARS-CoV2 | S; non- | B-cells; SARS-CoV2 | 726 | QVQLVQSGAEVKKPGASVKVSCKASGY |
| | | | | | | RBD | Human Patient | | TFTGYYMHWVRQAPGQGLEWMGWI |
| | | | | | | | | | NPNSDVTNYAQKFQGRVTMTRDTSIST |
| | | | | | | | | | AYMELSRLRSDDTAVYYCAREARDYYGS |
| | | | | | | | | | GSLDYWGQGTLVTVSS |
| CV33 | Ab | SARS-CoV2 | SARS-CoV1 | | SARS-CoV2 | S; non- | B-cells; SARS-CoV2 | 727 | QVQLVQSGAEVKKPGASVKVSCKASGY |
| | | | | | | RBD | Human Patient | | TFTSYDISWVRQAPGQGLEWMGWISA |
| | | | | | | | | | YNGNTNYAQKLQGRVTMTTDTSTSTAY |
| | | | | | | | | | MELRSLRSDDTAVYYCARDSVAGIYYYY |
| | | | | | | | | | GMDVWGQGTTVTVSS |
| CV34 | Ab | SARS-CoV2 | SARS-CoV1 | | SARS-CoV2 | S; non- | B-cells; SARS-CoV2 | 728 | QVQLVESGGGVVQPGRSLRLSCAASGF |
| | | | | | | RBD | Human Patient | | TFSSYAMHWVRQAPGKGLEWVAVISY |
| | | | | | | | | | DGSNKYYADSVKGRFTISRDNSKNTLYL |
| | | | | | | | | | QMNSLRAEDTAVYYCARSYGGSYYYGM |
| | | | | | | | | | DVWGQGTTVTVSS |
| CV35 | Ab | SARS-CoV2 | SARS-CoV1 | | SARS-CoV2 | S; non- | B-cells; SARS-CoV2 | 729 | QVQLQESGPGLVKPSETLSLTCTVSGYSI |
| | | | | | | RBD | Human Patient | | SSGYYWGWIRQPPGKGLEWIGSIYHSG |
| | | | | | | | | | STYYNPSLKSRVTISVDTSKNQFSLKLSS |
| | | | | | | | | | VTAADTAVYYCARTPLSLRLRYNWYFDLW |
| | | | | | | | | | GRGTLVTVSS |
| CV36 | Ab | SARS-CoV2 | SARS-CoV1 | | SARS-CoV2 | S; non- | B-cells; SARS-CoV2 | 730 | QVQLVQSGAEVKKPGASVKVSCKASGY |
| | | | | | | RBD | Human Patient | | TFTGYYMHWVRQAPGQGLEWMGWI |
| | | | | | | | | | NPNSGGTNYVQKFQGRVTMTRDTSIST |
| | | | | | | | | | AYMELNRLRSDDTAVYFCARDLTTTAGT |
| | | | | | | | | | DYYYGMDVWGQGTTVTVSS |
| CV37 | Ab | SARS-CoV1, | | | SARS-CoV2 | S; non- | B-cells; SARS-CoV2 | 731 | QVQLVQSGAEVKKPGASVKVSCKASGY |
| | | SARS-CoV2 | | | | RBD | Human Patient | | TFTSYGISWVRQAPGQGLEWMGWISA |
| | | | | | | | | | YNGNTNYAQKLQGRVTMTTDTSTSTAY |
| | | | | | | | | | MELRSLRSDDTAVYYCARARVAYDYIW |
| | | | | | | | | | GSYRYKAFDYWGQGTLVTVSS |
| CV38 | Ab | SARS-CoV1, | | | SARS-CoV2 | S; non- | B-cells; SARS-CoV2 | 732 | QVQLVESGGGVVQPGRSLRLSCAASGF |
| | | SARS-CoV2 | | | | RBD | Human Patient | | TFSSYAMHWVRQAPGKGLEWVAVISY |
| | | | | | | | | | DGSNKYYADSVKGRFTISRDNSKNTLYL |
| | | | | | | | | | QMNSLRAEDTAVYYCARAQTAHYSSSF |
| | | | | | | | | | DYWGQGTLVTVSS |
| CV38-113 | Ab | SARS-CoV2 | SARS-CoV1 | SARS-CoV2 | | S; RBD | B-cells; SARS-CoV2 | | ND |
| | | | | | | | Human Patient | | |
| CV38-139 | Ab | SARS-CoV2 | SARS-CoV1 | SARS-CoV2 | | S; RBD | B-cells; SARS-CoV2 | | ND |
| | | | | | | | Human Patient | | |
| CV38-142 | Ab | SARS-CoV1, | | SARS-CoV2 | | S; RBD | B-cells; SARS-CoV2 | | ND |
| | | SARS-CoV2 | | | | | Human Patient | | |
| CV38-183 | Ab | SARS-CoV2 | SARS-CoV1 | SARS-CoV2 | | S; RBD | B-cells; SARS-CoV2 | | ND |
| | | | | | | | Human Patient | | |
| CV38-221 | Ab | SARS-CoV2 | SARS-CoV1 | SARS-CoV2 | | S; RBD | B-cells; SARS-CoV2 | | ND |
| | | | | | | | Human Patient | | |
| CV39 | Ab | SARS-CoV2 | SARS-CoV1 | | SARS-CoV2 | S; non- | B-cells; SARS-CoV2 | 733 | QVQLVESGGGVVQPGRSMRLSCAASG |
| | | | | | | RBD | Human Patient | | FNLSSYAMHWVRQASGKGLEWVSLISY |
| | | | | | | | | | DGSIKYYADSVKGRFTVSGDNSKNTLFL |
| | | | | | | | | | QMSSLRADDSALYYCVRGGVSGPNAFD |
| | | | | | | | | | IWGQGTTVTVSS |
| CV4 | Ab | SARS-CoV1, | | | SARS-CoV2 | S; non- | B-cells; SARS-CoV2 | 734 | QVQLVESGGGVVQPGRSLRLSCAASGF |
| | | SARS-CoV2 | | | | RBD | Human Patient | | TFSSYAMHWVRQAPGKGLEWVAVISY |
| | | | | | | | | | DGSNKYYADSVKGRFTISRDNSKNTLYL |
| | | | | | | | | | QMNSLRAEDTAVYYCARSISGSYLGAFD |
| | | | | | | | | | YWGQGTLVTVSS |
| CV40 | Ab | SARS-CoV1, | | | SARS-CoV2 | S; non- | B-cells; SARS-CoV2 | 735 | QVQLVQSGAEVKKPGASVKVSCKASGY |
| | | SARS-CoV2 | | | | RBD | Human Patient | | TFSSYGISWVRQDPGQGLEWMGWISA |
| | | | | | | | | | YNGNTNYAQKLQGRVTMTTDTSTSTAY |
| | | | | | | | | | MELRSLRSDDTAVYYCARVGLWWLGH |
| | | | | | | | | | PDAFDIWGQGTMVTVSS |
| CV41 | Ab | SARS-CoV2 | SARS-CoV1 | | SARS-CoV2 | S; non- | B-cells; SARS-CoV2 | 736 | QVQLVESGGGVVQPGRSLRLSCAASGF |
| | | | | | | RBD | Human Patient | | TFSSYAMHWVRQAPGKGLEWVAVISY |
| | | | | | | | | | DGSNKYYADSVKGRFTISRDNSKNTLYL |
| | | | | | | | | | QMNSLRAEDTAVYYCARTKGGSYFAPF |
| | | | | | | | | | DYWGQGTLVTVSS |
| CV42 | Ab | SARS-CoV2 | SARS-CoV1 | | SARS-CoV2 | S; non- | B-cells; SARS-CoV2 | 737 | QVQLVQSGAEVKKPGASVKVSCKASGY |
| | | | | | | RBD | Human Patient | | TFTSYGISWVRQAPGQGLEWMGWISA |
| | | | | | | | | | YNGNTNYAQKVQGRVTMTTDTSTSTAY |
| | | | | | | | | | MELRSLRSDDTAVYYCARDRGYAATFG |
| | | | | | | | | | VFDYWGQGTLVTVSS |
| CV43 | Ab | SARS-CoV2 | SARS-CoV1 | | SARS-CoV2 | S; RBD | B-cells; SARS-CoV2 | 738 | QVQLVESGGGVVQPGRSLRLSCAASGF |
| | | | | | | | Human Patient | | TFSSYAMHWVRQAPGKGLEWVAVISY |
| | | | | | | | | | DGSNKYYADSVKGRFTISRDNSKNTLYL |
| | | | | | | | | | QMNSLRAEDTAVYYCARVTVVHFDYW |
| | | | | | | | | | GQGTLVTVSS |
| CV44 | Ab | SARS-CoV2 | SARS-CoV1 | | SARS-CoV2 | S; non- | B-cells; SARS-CoV2 | 739 | QVQLVQSGAEVKKPGASVKVSCKASGY |
| | | | | | | RBD | Human Patient | | TFTSYYMHWVRQAPGQGLEWMGIINP |
| | | | | | | | | | SGGSTSYAQKFQGRVTMTRDTSTSTVY |
| | | | | | | | | | MELSSLRSEDTAVYYCARDLTSTSSSPYS |
| | | | | | | | | | YYYGMDVWGQGTTVTVSS |
| CV45 | Ab | SARS-CoV1, | | | SARS-CoV2 | S; non- | B-cells; SARS-CoV2 | 740 | QVQLVQSGAEVKKPGASVKVSCKASGY |
| | | SARS-CoV2 | | | | RBD | Human Patient | | TFTSYGISWVRQAPGQGLEWMGWISA |
| | | | | | | | | | YNGNTNYAQKLQGRVTMTTDTSTSTAY |
| | | | | | | | | | MELRSLRSDDTAVYYCARVTVEAIFGVVI |
| | | | | | | | | | LPLKNWFDPWGQGTLVTVSS |
| CV46 | Ab | SARS-CoV2 | SARS-CoV1 | | SARS-CoV2 | S; non- | B-cells; SARS-CoV2 | 741 | QVQLVESGGGVVQPGRSLRLSCAASGF |
| | | | | | | RBD | Human Patient | | NLSNYAMHWVRQASGKGLEWVSLISY |
| | | | | | | | | | DGSIKYYTDSVKGRFTVSGDNSKNTLFLQ |
| | | | | | | | | | MNSLRPDDSALYYCVRGGVSGPNSFD |
| | | | | | | | | | MWGQGTTVTVSS |
| CV47 | Ab | SARS-CoV2 | SARS-CoV1 | | SARS-CoV2 | S; non- | B-cells; SARS-CoV2 | 742 | QVQLVQSGAEVKKPGASVKVSCKASGY |
| | | | | | | RBD | Human Patient | | TFTSYGISWVRQAPGQGLEWMGWISA |
| | | | | | | | | | YSGNTNYAQKLQGRVTMTTDTSTSTAY |
| | | | | | | | | | MEVRSLRSDDTAVYYCARVGLWWLGH |
| | | | | | | | | | PDVFDIWGQGTMVTVSS |
| CV48 | Ab | SARS-CoV2 | | | SARS-CoV2 | S; non- | B-cells; SARS-CoV2 | 743 | QVQLVQSGAEVKKPGSSVKVSCKASGG |
| | | | | | | RBD | Human Patient | | TFSSYTINWVRQAPGQGLEWMGRIIPIL |
| | | | | | | | | | GIADYAQKFQGRVTITADKSTSTAYMEL |
| | | | | | | | | | SSLRSEDTAVYYCARDLVEDTAMVTGAA |
| | | | | | | | | | AGTWGQGTLVTVSS |
| CV5 | Ab | SARS-CoV2 | SARS-CoV1 | | SARS-CoV2 | S; RBD | B-cells; SARS-CoV2 | 744 | QVQLVQSGAEVKKPGASVKVTCKASGY |
| | | | | | | | Human Patient | | TFTSYYLHWVRQAPGQGLEWMGIINPS |
| | | | | | | | | | GGTTSYAQKFQGRVTMTRDTSTSTVYM |
| | | | | | | | | | ELSSLRSEDTAVYYCARAGRRYSSSDDGA |
| | | | | | | | | | FDIWGQGTMVTVSS |
| CV50 | Ab | SARS-CoV2 | | | SARS-CoV2 | S; non- | B-cells; SARS-CoV2 | 745 | QVQLVESGGGVVQPGRSLRLSCAASGF |
| | | | | | | RBD | Human Patient | | TFSSYGMHWVRQAPGKGLEWVAVIWY |
| | | | | | | | | | DGSNKYYADSVKGRFTISRDNSKNTLYL |
| | | | | | | | | | QMNSLRAEDTAVYYCARDIMFGDDWL |
| | | | | | | | | | QKQPDYWGQGTLVTVSS |
| CV7 | Ab | SARS-CoV2 | SARS-CoV1 | | SARS-CoV2 | S; non- | B-cells; SARS-CoV2 | 746 | QVQLVESGGGVVQPGRSLRLSCAASGF |
| | | | | | | RBD | Human Patient | | TFSSYAMHWVRQAPGKGLEWVAVISY |
| | | | | | | | | | DGSNKYYADSVKGRFTISRDNSKNTLYL |
| | | | | | | | | | QMNSLRAEDTAVYYCARSISGSYLGAFD |
| | | | | | | | | | YWGQGTLVTVSS |
| CV8 | Ab | SARS-CoV1, | | | SARS-CoV2 | S; non- | B-cells; SARS-CoV2 | 747 | QVQLVQSGAEVKKPGASVKVSCKASGY |
| | | SARS-CoV2 | | | | RBD | Human Patient | | TFTSYGISWVRQAPGQGLEWMGWISA |
| | | | | | | | | | YNGNTNYAQKLQGRVTMTTDTSTSTAY |
| | | | | | | | | | MELRSLRSDDTAVYYCARLVPTWASYYD |
| | | | | | | | | | FWSGYPGGYGMDVWGQGTTVTVSS |
| CV9 | Ab | SARS-CoV1, | | | SARS-CoV2 | S; non- | B-cells; SARS-CoV2 | 748 | QLQLQESGPGLVKPSETLSLTCTVSGGSI |
| | | SARS-CoV2 | | | | RBD | Human Patient | | SSSSYYWGWIRQPPGKGLEWIGSIYYSG |
| | | | | | | | | | STYYNPSLKSRVTISVDTSKNQFSLKLSS |
| | | | | | | | | | VTAADTAVYYCATHIVVVTATPNWYFDL |
| | | | | | | | | | WGRGTLVTVSS |
| EY6A | Ab | SARS-CoV2 | | SARS-CoV2 | | S; RBD | B-cells; SARS-CoV2 | 749 | EVQLVESGGGVVQPGRSLRLSCAASAFT |
| | | | | | | | Human Patient | | FSSYDMHWVRQAPGKGLEWVAVISYD |
| | | | | | | | | | GSNKYYADSVKGRFTISRDNSKNTLYLQ |
| | | | | | | | | | MNSLRAEDTAVYYCAKDGGKLWVYYFD |
| | | | | | | | | | YWGQGTLVTVSS |
| Fab 2-4 | Ab | SARS-CoV2 | | SARS-CoV2 | | S; RBD | B-cells; SARS-CoV2 | 750 | QVQLVQSGAEVKKPGASVKVSCKASGY |
| | | | | | | | Human Patient | | TFTGYYMHWVRQAPGQGLEWMGWI |
| | | | | | | | | | NPNSGGTNYTQMFQGRVTMTRDTSIST |
| | | | | | | | | | AYMEVSRLRSDDTAVYYCARDRSWAVV |
| | | | | | | | | | YYYMDVWGKGTTVTVSS |
| FnC1t1p2_ | Ab | SARS-CoV2 | | SARS-CoV2 | | S; SInon- | B-cells; SARS-CoV2 | 751 | QVQLVQSGAEVKKPGASVKVSCKASGY |
| A5 | | | | | | RBD | Human Patient | | TFTSYDINWVRQATGQGLEWMGWMN |
| | | | | | | | | | PNSGNTGYAQKFQGRVTMTRNTSISTA |
| | | | | | | | | | YMELSSLRSEDTAVYYCARATTDCSSTSC |
| | | | | | | | | | WSLDFWSGYYTGGREKIFDWGQGTLVT |
| | | | | | | | | | VSS |
| FnC1t2p1_ | Ab | SARS-CoV2 | | SARS-CoV2 | | S; RBD | B-cells; SARS-CoV2 | 752 | QVQLVQSGSELKKPGASVKVSCKASGYT |
| D4 | | | | | | | Human Patient | | FLRFAMNWLRQAPGQGLEWMGWIDT |
| | | | | | | | | | NTGTPTYAQGFTGRFVFSLDTSVSTAYL |
| | | | | | | | | | QISSLKAEDTAVYYCARSLRGANLVPWG |
| | | | | | | | | | QGTLVTVSS |
| FnC1t2p1_ | Ab | SARS-CoV2 | | SARS-CoV2 | | S; RBD | B-cells; SARS-CoV2 | 753 | QVQLVQSGSELKKPGASVKVSCKASGYT |
| G5 | | | | | | | Human Patient | | FLRFAMNWLRQAPGQGLEWMGWIDT |
| | | | | | | | | | NTGTPTYAQGFTGRFVFSLDTSVSTAYL |
| | | | | | | | | | QISSLKAEDTAVYYCARSLRGANLVPWG |
| | | | | | | | | | QGTLVTVSS |
| H014 | Ab | SARS-CoV1, | | SARS-CoV1, | | S; RBD | Immunised | | ND |
| | | SARS-CoV2 | | SARS-CoV2 | | | Humanised (hACE2) | | |
| | | | | | | | Mouse | | |
| H11-D4 | Nb | SARS-CoV2 | | SARS-CoV2 | | S; RBD | Phage Display | 754 | QVQLVESGGGLMQAGGSLRLSCAVSGR |
| | | | | | | | Library (Nanobody, | | TFSTAAMGWFRQAPGKEREFVAAIRWS |
| | | | | | | | non-immune) | | GGSAYYADSVKGRFTISRDKAKNTVYLQ |
| | | | | | | | | | MNSLKYEDTAVYYCARTENVRSLLSDYA |
| | | | | | | | | | TWPYDYWGQGTQVTVSS |
| H11-H4 | Nb | SARS-CoV2 | | SARS-CoV2 | | S; RBD | Phage Display | 755 | QVQLVESGGGLMQAGGSLRLSCAVSGR |
| | | | | | | | Library (Nanobody, | | TFSTAAMGWFRQAPGKEREFVAAIRWS |
| | | | | | | | non-immune) | | GGSAYYADSVKGRFTISRDKAKNTVYLQ |
| | | | | | | | | | MNSLKYEDTAVYYCAQTHYVSYLLSDYA |
| | | | | | | | | | TWPYDYWGQGTQVTVSS |
| H4 | Ab | SARS-CoV2 | | SARS-CoV2 | | S; RBD | B-cells; SARS-CoV2 | 756 | QVQLVQSGAEVKKPGASVKVSCKASGY |
| | | | | | | | Human Patient | | TFTGYYMHWVRQAPGQGLEWMGRIN |
| | | | | | | | | | PNSGGTNYAQKFQGRVTMTRDTSISTA |
| | | | | | | | | | YMELSRLRSDDTAVYYCARVPYCSSTSCH |
| | | | | | | | | | RDWYFDLWGRGTLVTVSS |
| HbnC2t1p2_ | Ab | SARS-CoV2 | | SARS-CoV2 | | S; RBD | B-cells; SARS-CoV2 | 757 | QVQLVESGGGVVQPGRSLRLSCAASGF |
| D9 | | | | | | | Human Patient | | TFSSYGMHWVRQAPGKGLEWVAVIWY |
| | | | | | | | | | DGRNKYYVDSVKGRFTISRDNSKNTLYL |
| | | | | | | | | | QISSLRAEDTAVYYCARAARRPVVTDTM |
| | | | | | | | | | AYYMDVWGKGTTVTVSS |
| HbnC3t1p1_ | Ab | SARS-CoV2 | | SARS-CoV2 | | S; RBD | B-cells; SARS-CoV2 | 758 | QMQLVQSGPEVKKPGTSVKVSCKASGF |
| C6 | | | | | | | Human Patient | | TFTSSAVQWVRQARGQRLEWIGWIVV |
| | | | | | | | | | GSGNTNYAQKFQERVTITRDMSTSTAY |
| | | | | | | | | | MELSSLRSEDTAVYYCAAPHCSSTICYDG |
| | | | | | | | | | FDIWGQGTMVTVSS |
| HbnC3t1p1_ | Ab | SARS-CoV2 | | SARS-CoV2 | | S; RBD | B-cells; SARS-CoV2 | 759 | QVQLVESGGGVVQPGRSLRLSCAATGF |
| F4 | | | | | | | Human Patient | | TFRRYGMHWVRQAPGKGLEWVAGILF |
| | | | | | | | | | DGSNKYYVDSVKGRFTISRDSSRNTLYLQ |
| | | | | | | | | | LNSLRREDTAVYYCAKGGDYEWELLES |
| | | | | | | | | | WGQGTLVTVSS |
| HbnC3t1p1_ | Ab | SARS-CoV2 | | SARS-CoV2 | | S; RBD | B-cells; SARS-CoV2 | 760 | EVQLVESGGGLVQPGGSLRLSCAASGFT |
| G4 | | | | | | | Human Patient | | VSSNYMSWVRQAPGKGLEWVSVIYSG |
| | | | | | | | | | GSTFYADSVKGRFTISRDNSKNTLYLQM |
| | | | | | | | | | NSLRAEDTAVYYCARDFGDFFFDYWGQ |
| | | | | | | | | | GTLVTVSS |
| HbnC3t1p2_ | Ab | SARS-CoV2 | | SARS-CoV2 | | S; RBD | B-cells; SARS-CoV2 | 761 | EVQLVESGGGLVQPGGSLRLSCAASGFI |
| B10 | | | | | | | Human Patient | | VSSNYMSWVRQAPGKGLEWVSVIYSG |
| | | | | | | | | | GSTFYADSVKGRFTISRDNSKNTLYLQM |
| | | | | | | | | | NSLRAEDTAVYYCARDYGDYFFDYWGQ |
| | | | | | | | | | GTLVTVSS |
| HbnC3t1p2_ | Ab | SARS-CoV2 | | SARS-CoV2 | | S; RBD | B-cells; SARS-CoV2 | 762 | QMQLVQSGPEVKKPGTSVKVSCKASGF |
| C6 | | | | | | | Human Patient | | TFSSSAVQWVRQARGQRLEWIGWIVV |
| | | | | | | | | | GSGNTNYAQKFQGRVTITRDMSTRTAY |
| | | | | | | | | | MELSSLRSEDTAMYYCAAPYCSSTRCYD |
| | | | | | | | | | AFDIWGQGTMVTVSS |
| HbnC4t1p1_ | Ab | SARS-CoV2 | | SARS-CoV2 | | S; RBD | B-cells; SARS-CoV2 | 763 | EVQLVESGGGLVQPGRSLRLSCAASGFT |
| D5 | | | | | | | Human Patient | | FDDYAMHWVRQAPGKGLEWVSGISW |
| | | | | | | | | | NSGSIGYADSVKGRFTISRDNAKNSLYLQ |
| | | | | | | | | | MNSLRAEDTGLYYCAKDINYDSGGYHK |
| | | | | | | | | | NYFDYWGQGTLVTVSS |
| Ju et al., | Ab | SARS-CoV2 | | SARS-CoV2 | SARS-CoV2 | S; Various | B-cells; SARS-CoV2 | | 205 |
| 2020 | | | | | | | Human Patient | | |
| Kim et | Ab | SARS-CoV2 | | SARS-CoV2 | | S; RBD | B-cells; SARS-CoV2 | | Various |
| al., 2020 | | | | | | | Human Patient | | |
| LR1 | Nb | SARS-CoV2 | | | | S; RBD | Phage Display | 764 | QVQLVESGGGSVQAGGSLRLSCAASGSI |
| | | | | | | | Library (Nanobody, | | SSITYLGWFRQAPGKEREGVAALITDSG |
| | | | | | | | non-immune) | | RTYYADSVKGRFTVSLDNAKNTVYLQM |
| | | | | | | | | | NSLKPEDTALYYCAAAEWGYEWPLYYAS |
| | | | | | | | | | SWYWGQGTQVTVSS |
| LR11 | Nb | SARS-CoV2 | | | | S; RBD | Phage Display | 765 | QVQLVESGGGSVQAGGSLRLSCAASGSI |
| | | | | | | | Library (Nanobody, | | SSITYLGWFRQAPGKEREGVAALITDSG |
| | | | | | | | non-immune) | | RTYYADSVKGRFTVSLDNAKNTVYLQM |
| | | | | | | | | | NSLKPEDTALYYCAAAEWGYEWPLYYAS |
| | | | | | | | | | SWYWGQGTQVTVSS |
| LR15 | Nb | SARS-CoV2 | | | | S; RBD | Phage Display | 766 | QVQLVESGGGSVQAGGSLRLSCAASGSI |
| | | | | | | | Library (Nanobody, | | SSITYLGWFRQAPGKEREGVAALITDSG |
| | | | | | | | non-immune) | | RTYYADSVKGRFTVSLDNAKNTVYLQM |
| | | | | | | | | | NSLKPEDTALYYCAAAEWGYEWPLYYAS |
| | | | | | | | | | SWYWGQGTQVTVSS |
| LR16 | Nb | SARS-CoV2 | | | | S; RBD | Phage Display | 767 | QVQLVESGGGSVQAGGSLRLSCAASGSI |
| | | | | | | | Library (Nanobody, | | SSITYLGWFRQAPGKEREGVAALITDSG |
| | | | | | | | non-immune) | | RTYYADSVKGRFTVSLDNAKNTVYLQM |
| | | | | | | | | | NSLKPEDTALYYCAAAEWGYEWPLYYAS |
| | | | | | | | | | SWYWGQGTQVTVSS |
| LR2 | Nb | SARS-CoV2 | | | | S; RBD | Phage Display | 768 | QVQLVESGGGSVQAGGSLRLSCAASGSI |
| | | | | | | | Library (Nanobody, | | SSITYLGWFRQAPGKEREGVAALITDSG |
| | | | | | | | non-immune) | | RTYYADSVKGRFTVSLDNAKNTVYLQM |
| | | | | | | | | | NSLKPEDTALYYCAAAEWGYEWPLYYAS |
| | | | | | | | | | SWYWGQGTQVTVSS |
| LR3 | Nb | SARS-CoV2 | | | | S; RBD | Phage Display | 769 | QVQLVESGGGSVQAGGSLRLSCAASGSI |
| | | | | | | | Library (Nanobody, | | SSITYLGWFRQAPGKEREGVAALITDSG |
| | | | | | | | non-immune) | | RTYYADSVKGRFTVSLDNAKNTVYLQM |
| | | | | | | | | | NSLKPEDTALYYCAAAEWGYEWPLYYAS |
| | | | | | | | | | SWYWGQGTQVTVSS |
| LR5 | Nb | SARS-CoV2 | | | | S; RBD | Phage Display | 770 | QVQLVESGGGSVQAGGSLRLSCAASGSI |
| | | | | | | | Library (Nanobody, | | SSITYLGWFRQAPGKEREGVAALITDSG |
| | | | | | | | non-immune) | | RTYYADSVKGRFTVSLDNAKNTVYLQM |
| | | | | | | | | | NSLKPEDTALYYCAAAEWGYEWPLYYAS |
| | | | | | | | | | SWYWGQGTQVTVSS |
| LR6 | Nb | SARS-CoV2 | | | | S; RBD | Phage Display | 771 | QVQLVESGGGSVQAGGSLRLSCAASGSI |
| | | | | | | | Library (Nanobody, | | SSITYLGWFRQAPGKEREGVAALITDSG |
| | | | | | | | non-immune) | | RTYYADSVKGRFTVSLDNAKNTVYLQM |
| | | | | | | | | | NSLKPEDTALYYCAAAEWGYEWPLYYAS |
| | | | | | | | | | SWYWGQGTQVTVSS |
| LR7 | Nb | SARS-CoV2 | | | | S; RBD | Phage Display | 772 | QVQLVESGGGSVQAGGSLRLSCAASGSI |
| | | | | | | | Library (Nanobody, | | SSITYLGWFRQAPGKEREGVAALITDSG |
| | | | | | | | non-immune) | | RTYYADSVKGRFTVSLDNAKNTVYLQM |
| | | | | | | | | | NSLKPEDTALYYCAAAEWGYEWPLYYAS |
| | | | | | | | | | SWYWGQGTQVTVSS |
| LR8 | Nb | SARS-CoV2 | | | | S; RBD | Phage Display | 773 | QVQLVESGGGSVQAGGSLRLSCAASGSI |
| | | | | | | | Library (Nanobody, | | SSITYLGWFRQAPGKEREGVAALITDSG |
| | | | | | | | non-immune) | | RTYYADSVKGRFTVSLDNAKNTVYLQM |
| | | | | | | | | | NSLKPEDTALYYCAAAEWGYEWPLYYAS |
| | | | | | | | | | SWYWGQGTQVTVSS |
| mAb-1 | Ab | SARS-CoV1, | 229E, HKU1, | | | S; Unk | B-cells; SARS-CoV1 | 774 | QVQLVESGGGSVQAGGSLRLSCAASGSI |
| | | SARS-CoV2 | NL63, OC43 | | | | Human Patient | | SSITYLGWFRQAPGKEREGVAALITDSG |
| | | | | | | | | | RTYYADSVKGRFTVSLDNAKNTVYLQM |
| | | | | | | | | | NSLKPEDTALYYCAAAEWGYEWPLYYAS |
| | | | | | | | | | SWYWGQGTQVTVSS |
| mAb-10 | Ab | SARS-CoV1, | 229E, HKU1, | | | S; Unk | B-cells; SARS-CoV1 | 775 | QVQLVESGGGSVQAGGSLRLSCAASGSI |
| | | SARS-CoV2 | NL63, OC43 | | | | Human Patient | | SSITYLGWFRQAPGKEREGVAALITDSG |
| | | | | | | | | | RTYYADSVKGRFTVSLDNAKNTVYLQM |
| | | | | | | | | | NSLKPEDTALYYCAAAEWGYEWPLYYAS |
| | | | | | | | | | SWYWGQGTQVTVSS |
| mAb-100 | Ab | SARS-CoV2 | 229E, HKU1, | | | S; Unk | B-cells; SARS-CoV1 | 776 | QVQLVESGGGSVQAGGSLRLSCAASGSI |
| | | (weak) | NL63, OC43, | | | | Human Patient | | SSITYLGWFRQAPGKEREGVAALITDSG |
| | | | SARS-CoV1 | | | | | | RTYYADSVKGRFTVSLDNAKNTVYLQM |
| | | | | | | | | | NSLKPEDTALYYCAAAEWGYEWPLYYAS |
| | | | | | | | | | SWYWGQGTQVTVSS |
| mAb-101 | Ab | SARS-CoV2 | 229E, HKU1, | | | S; Unk | B-cells; SARS-CoV1 | 777 | QVQLVESGGGSVQAGGSLRLSCAASGSI |
| | | (weak) | NL63, OC43, | | | | Human Patient | | SSITYLGWFRQAPGKEREGVAALITDSG |
| | | | SARS-CoV1 | | | | | | RTYYADSVKGRFTVSLDNAKNTVYLQM |
| | | | | | | | | | NSLKPEDTALYYCAAAEWGYEWPLYYAS |
| | | | | | | | | | SWYWGQGTQVTVSS |
| mAb-102 | Ab | SARS-CoV2 | 229E, HKU1, | | | S; Unk | B-cells; SARS-CoV1 | 778 | QVQLVESGGGSVQAGGSLRLSCAASGSI |
| | | (weak) | NL63, OC43, | | | | Human Patient | | SSITYLGWFRQAPGKEREGVAALITDSG |
| | | | SARS-CoV1 | | | | | | RTYYADSVKGRFTVSLDNAKNTVYLQM |
| | | | | | | | | | NSLKPEDTALYYCAAAEWGYEWPLYYAS |
| | | | | | | | | | SWYWGQGTQVTVSS |
| mAb-103 | Ab | SARS-CoV2 | 229E, HKU1, | | | S; Unk | B-cells; SARS-CoV1 | 779 | QVQLVESGGGSVQAGGSLRLSCAASGSI |
| | | (weak) | NL63, OC43, | | | | Human Patient | | SSITYLGWFRQAPGKEREGVAALITDSG |
| | | | SARS-CoV1 | | | | | | RTYYADSVKGRFTVSLDNAKNTVYLQM |
| | | | | | | | | | NSLKPEDTALYYCAAAEWGYEWPLYYAS |
| | | | | | | | | | SWYWGQGTQVTVSS |
| mAb-104 | Ab | SARS-CoV2 | 229E, HKU1, | | | S; Unk | B-cells; SARS-CoV1 | 780 | QVQLVESGGGSVQAGGSLRLSCAASGSI |
| | | (weak) | NL63, OC43, | | | | Human Patient | | SSITYLGWFRQAPGKEREGVAALITDSG |
| | | | SARS-CoV1 | | | | | | RTYYADSVKGRFTVSLDNAKNTVYLQM |
| | | | | | | | | | NSLKPEDTALYYCAAAEWGYEWPLYYAS |
| | | | | | | | | | SWYWGQGTQVTVSS |
| mAb-105 | Ab | SARS-CoV2 | 229E, HKU1, | | | S; Unk | B-cells; SARS-CoV1 | 781 | QVQLVESGGGSVQAGGSLRLSCAASGSI |
| | | (weak) | NL63, OC43, | | | | Human Patient | | SSITYLGWFRQAPGKEREGVAALITDSG |
| | | | SARS-CoV1 | | | | | | RTYYADSVKGRFTVSLDNAKNTVYLQM |
| | | | | | | | | | NSLKPEDTALYYCAAAEWGYEWPLYYAS |
| | | | | | | | | | SWYWGQGTQVTVSS |
| mAb-106 | Ab | SARS-CoV2 | 229E, HKU1, | | | S; Unk | B-cells; SARS-CoV1 | 782 | QVQLVESGGGSVQAGGSLRLSCAASGSI |
| | | (weak) | NL63, OC43, | | | | Human Patient | | SSITYLGWFRQAPGKEREGVAALITDSG |
| | | | SARS-CoV1 | | | | | | RTYYADSVKGRFTVSLDNAKNTVYLQM |
| | | | | | | | | | NSLKPEDTALYYCAAAEWGYEWPLYYAS |
| | | | | | | | | | SWYWGQGTQVTVSS |
| mAb-107 | Ab | SARS-CoV1, | 229E, HKU1, | | | S; Unk | B-cells; SARS-CoV1 | 783 | QVQLVESGGGSVQAGGSLRLSCAASGSI |
| | | SARS-CoV2 | NL63, OC43 | | | | Human Patient | | SSITYLGWFRQAPGKEREGVAALITDSG |
| | | (weak) | | | | | | | RTYYADSVKGRFTVSLDNAKNTVYLQM |
| | | | | | | | | | NSLKPEDTALYYCAAAEWGYEWPLYYAS |
| | | | | | | | | | SWYWGQGTQVTVSS |
| mAb-108 | Ab | SARS-CoV2 | 229E, HKU1, | | | S; Unk | B-cells; SARS-CoV1 | 784 | QVQLVESGGGSVQAGGSLRLSCAASGSI |
| | | (weak) | NL63, OC43, | | | | Human Patient | | SSITYLGWFRQAPGKEREGVAALITDSG |
| | | | SARS-CoV1 | | | | | | RTYYADSVKGRFTVSLDNAKNTVYLQM |
| | | | | | | | | | NSLKPEDTALYYCAAAEWGYEWPLYYAS |
| | | | | | | | | | SWYWGQGTQVTVSS |
| mAb-109 | Ab | SARS-CoV1, | 229E, HKU1, | | | S; Unk | B-cells; SARS-CoV1 | 785 | QVQLVESGGGSVQAGGSLRLSCAASGSI |
| | | SARS-CoV2 | NL63, OC43 | | | | Human Patient | | SSITYLGWFRQAPGKEREGVAALITDSG |
| | | (weak) | | | | | | | RTYYADSVKGRFTVSLDNAKNTVYLQM |
| | | | | | | | | | NSLKPEDTALYYCAAAEWGYEWPLYYAS |
| | | | | | | | | | SWYWGQGTQVTVSS |
| mAb-11 | Ab | SARS-CoV1, | 229E, HKU1, | | | S; Unk | B-cells; SARS-CoV1 | 786 | QVQLVESGGGSVQAGGSLRLSCAASGSI |
| | | SARS-CoV2 | NL63, OC43 | | | | Human Patient | | SSITYLGWFRQAPGKEREGVAALITDSG |
| | | | | | | | | | RTYYADSVKGRFTVSLDNAKNTVYLQM |
| | | | | | | | | | NSLKPEDTALYYCAAAEWGYEWPLYYAS |
| | | | | | | | | | SWYWGQGTQVTVSS |
| mAb-110 | Ab | SARS-CoV1, | 229E, HKU1, | | | S; Unk | B-cells; SARS-CoV1 | 787 | EVQLVESGGGVVQPGRSLRLSCAASGFT |
| | | SARS-CoV2 | NL63, OC43 | | | | Human Patient | | FSSYGMHWVRQAPGKGLEWVAVIWY |
| | | (weak) | | | | | | | DGSNKYYADSVKGRFTISRDNSKNTLYL |
| | | | | | | | | | QMNSLRAEDTAVYYCARVGSGRVYWG |
| | | | | | | | | | QGTLVTVSS |
| mAb-111 | Ab | 229E | HKU1, | | | S; Unk | B-cells; SARS-CoV1 | 788 | QVQLVESGPGLVRPSGTLSVTCAVSGDS |
| | | (weak), | NL63, OC43 | | | | Human Patient | | ISSDYWCTWVRQSPGKGLEWIGKISHS |
| | | SARS-CoV1, | | | | | | | GSLNYNPSLKSRVTMSVDKSKNHFSLKL |
| | | SARS-CoV2 | | | | | | | ASVTAADTAVYYCARVRIGASHHNFWS |
| | | (weak) | | | | | | | GYYTDAFDIWGQGTTVTVSS |
| mAb-112 | Ab | 229E | OC43 | | | S; Unk | B-cells; SARS-CoV1 | 789 | QVQLVQSGAEVKKPGESLKISCKASGYS |
| | | (weak), | | | | | Human Patient | | FTNYWVGWVRQMPAKGLEWMGIIWP |
| | | HKU1 | | | | | | | DDSDTRYRPSFQGQVTISVDKSISTAYLH |
| | | (weak), | | | | | | | WNSLKASDNGMYFCARAPLASCSGGRC |
| | | NL63, SARS- | | | | | | | PTYNRFDLWGQGTLVTVSS |
| | | CoV1, SARS- | | | | | | | |
| | | CoV2 | | | | | | | |
| | | (weak) | | | | | | | |
| mAb-113 | Ab | 229E, HKU1 | OC43 | | | S; Unk | B-cells; SARS-CoV1 | 790 | QVQLVQSGAEVKKPGSSMKVSCKASGV |
| | | (weak), | | | | | Human Patient | | NFRSYSFSWVRQAPGQGLEWMGGVIP |
| | | NL63, SARS- | | | | | | | YFPTANYADKFRDRVTITADESTGTVYLD |
| | | CoV1, SARS- | | | | | | | MSSLRSEDTAVYFCASEYFDGRSYHSFC |
| | | CoV2 | | | | | | | GLDVWGQGTTVTVSS |
| | | (weak) | | | | | | | |
| mAb-114 | Ab | 229E, HKU1, | OC43 | | | S; Unk | B-cells; SARS-CoV1 | 791 | QVQLVESGGGLVQPGGSLRLSCAASGF |
| | | NL63, SARS- | | | | | Human Patient | | TFSNYAMTWVRQAPGKGLKWVSGINP |
| | | CoV1, SARS- | | | | | | | SGDATFYTDSVKGQFTISRDNSKNILYLQ |
| | | CoV2 | | | | | | | MNRLRADDTAIYYCAKGLSFYGSGSDAF |
| | | (weak) | | | | | | | DVWGQGTTVTVSS |
| mAb-115 | Ab | 229E, HKU1 | OC43 | | | S; Unk | B-cells; SARS-CoV1 | 792 | QVQLVQSGAEVKKPGASVKVSCKASGY |
| | | (weak), | | | | | Human Patient | | TFTDYYVHWVRQVPGQGLEWMGWIS |
| | | NL63, SARS- | | | | | | | PDSGDTIRAQNFQGRVTMTRDTSMNT |
| | | CoV1, SARS- | | | | | | | AYMEVNRLRTDDTAIYYCARDLISVIRGL |
| | | CoV2 | | | | | | | GGGMDVWGQGTTVTVSS |
| | | (weak) | | | | | | | |
| mAb-116 | Ab | 229E | OC43 | | | S; Unk | B-cells; SARS-CoV1 | 793 | QVQLVQSGAEVKKPGASVKVSCKTSGY |
| | | (weak), | | | | | Human Patient | | TFTGHYIHWVRQAPGQGLEWMGWIN |
| | | HKU1 | | | | | | | PASGDTNYAQKFQGRVTKTRDTSITTAY |
| | | (weak), | | | | | | | MELNRLRSDDTAVYYCARGGPLPWSDL |
| | | NL63 | | | | | | | DIVGTFDYWGQGTLVTVSS |
| | | (weak), | | | | | | | |
| | | SARS-CoV1, | | | | | | | |
| | | SARS-CoV2 | | | | | | | |
| | | (weak) | | | | | | | |
| mAb-117 | Ab | 229E, HKU1, | OC43 | | | S; Unk | B-cells; SARS-CoV1 | 794 | EVQLVESGGGVVQPGKSLRLSCVPSGFS |
| | | NL63, SARS- | | | | | Human Patient | | FGTYGMHWVRQAPGKGPEWLAVMW |
| | | CoV1, SARS- | | | | | | | YDGITQYYADSVKGRFTISRDNSKETLYL |
| | | CoV2 | | | | | | | QMNSLTADDTGIYYCVKDQSSGDRLLYL |
| | | (weak) | | | | | | | GYFDLWGPGALVTVSS |
| mAb-118 | Ab | 229E, HKU1 | OC43 | | | S; Unk | B-cells; SARS-CoV1 | 795 | QVQLVQSGGGVVQPGKSLRLSCVASGF |
| | | (weak), | | | | | Human Patient | | SFGTYGMHWVRQAPGKGPEWLAVM |
| | | NL63 | | | | | | | WYDGITQYYADSVKGRFTISRDNSKETLY |
| | | (weak), | | | | | | | LQMNSLTADDTGVYYCVKDQSSGDRLL |
| | | SARS-CoV1, | | | | | | | YLGYFDLWGPGTLVTVSS |
| | | SARS-CoV2 | | | | | | | |
| | | (weak) | | | | | | | |
| mAb-119 | Ab | 229E, HKU1 | OC43 | | | S; Unk | B-cells; SARS-CoV1 | 796 | QVQLQESGPGLVKPSGTLSLTCAVSGAS |
| | | (weak), | | | | | Human Patient | | VSSDHWWSWVRQSPGKGLEWIGEVY |
| | | NL63 | | | | | | | HSGSTNYNPSLKSRVTISLDQSNNQFSLK |
| | | (weak), | | | | | | | LTSVTAADTAIYYCATMWGGLCTASNCY |
| | | SARS-CoV1, | | | | | | | GNPMDVWGQGTTVTVSS |
| | | SARS-CoV2 | | | | | | | |
| | | (weak) | | | | | | | |
| mAb-12 | Ab | SARS-CoV1, | 229E, HKU1, | | | S; Unk | B-cells; SARS-CoV1 | 797 | QVQLVQSGAEVRKPGSSVKLSCKASGG |
| | | SARS-CoV2 | NL63, OC43 | | | | Human Patient | | TFSTHAISWVRQAPGQRPEWMGGIMP |
| | | | | | | | | | IFGESKDTQKFQGRVTFTADESTTTAYM |
| | | | | | | | | | ELRSLRSDDTAIYYCVRDSDPYTATVTSN |
| | | | | | | | | | HYWYAMDVWGQGTTVTVSS |
| mAb-120 | Ab | 229E | OC43 | | | S; Unk | B-cells; SARS-CoV1 | 798 | QVQLQQWGAGVLKPSETLSLTCAVYGG |
| | | (weak), | | | | | Human Patient | | SFRGFFWSWIRQPPGKGLEWIGQITHS |
| | | HKU1 | | | | | | | GSTNYNSSLKSRLTISVDTSKNQFSLNLS |
| | | (weak), | | | | | | | SVTAADTAIYYCARGQGGYDLRRVGYGLT |
| | | NL63 | | | | | | | SWFDPWGQGILVTVSS |
| | | (weak), | | | | | | | |
| | | SARS-CoV1, | | | | | | | |
| | | SARS-CoV2 | | | | | | | |
| | | (weak) | | | | | | | |
| mAb-121 | Ab | 229E, HKU1 | OC43 | | | S; Unk | B-cells; SARS-CoV1 | 799 | QVQLVQSGAEVKKPGASVKVSCKASGY |
| | | (weak), | | | | | Human Patient | | TFTSYYIHWVRQAPGQGLEWLGVIHPS |
| | | NL63 | | | | | | | GGSTTFAQKFQGRVTMTRDTSTSTVYM |
| | | (weak), | | | | | | | ELGSLRSDDTAVYYCARVLAGSSHEWQL |
| | | SARS-CoV1, | | | | | | | THDAFDIWGQGTTVTVSS |
| | | SARS-CoV2 | | | | | | | |
| | | (weak) | | | | | | | |
| mAb-122 | Ab | 229E | OC43 | | | S; Unk | B-cells; SARS-CoV1 | 800 | EVQLVESGAEVKKPGASVILSCKASGYTV |
| | | (weak), | | | | | Human Patient | | TNYYIHWVRQAPGQGLEWMGWIDPD |
| | | HKU1 | | | | | | | SGVTNFAEKFQGRVTMTRDTSISTAYME |
| | | (weak), | | | | | | | LRWLESDDTAVYYCAKDLITVIRGLGGG |
| | | NL63 | | | | | | | MDVWGQGTTVTVSS |
| | | (weak), | | | | | | | |
| | | SARS-CoV1, | | | | | | | |
| | | SARS-CoV2 | | | | | | | |
| | | (weak) | | | | | | | |
| mAb-123 | Ab | 229E | NL63, OC43 | | | S; Unk | B-cells; SARS-CoV1 | 801 | EVQLLESGAEVKKPGSSVKVSCKASGGT |
| | | (weak), | | | | | Human Patient | | FSSDAISWVRQAPGQGLEWMGGIIPIF |
| | | HKU1 | | | | | | | GTTNYAQKFQGRVTITADESTNTAYMEL |
| | | (weak), | | | | | | | SSLRSEDTAVYYCARDGPYDSGGYHLNH |
| | | SARS-CoV1, | | | | | | | WGQGTLVTVSS |
| | | SARS-CoV2 | | | | | | | |
| | | (weak) | | | | | | | |
| mAb-124 | Ab | HKU1 | 229E, NL63, | | | S; Unk | B-cells; SARS-CoV1 | 802 | EVQLLESGGGVVNPGGSMRLSCAGSGF |
| | | (weak), | OC43 | | | | Human Patient | | TFSDHYMGWIRQAPGKGLEVISYISSSG |
| | | SARS-CoV1, | | | | | | | SFIRDADSVKGRFTISRDNAKNSVYLQM |
| | | SARS-CoV2 | | | | | | | NSLRAEDTAVYYCARMGPYGSGTFDYW |
| | | (weak) | | | | | | | GQGTLVTVSS |
| mAb-125 | Ab | 229E, HKU1 | OC43 | | | S; Unk | B-cells; SARS-CoV1 | 803 | EVQLVESGAEVRKPGSSVKVSCKATGGT |
| | | (weak), | | | | | Human Patient | | FSSYGITWVRQAPGQGLEWMGRIIPTL |
| | | NL63 | | | | | | | GRTNYAQKFQGRVTITADKSTSTAHMEL |
| | | (weak), | | | | | | | SSLRSEDTAVYYCARDLSTLQPDAIVNFD |
| | | SARS-CoV1, | | | | | | | YWGQGTLVTVSS |
| | | SARS-CoV2 | | | | | | | |
| | | (weak) | | | | | | | |
| mAb-126 | Ab | HKU1 | 229E, NL63, | | | S; Unk | B-cells; SARS-CoV1 | 804 | QVQLVQSGAEVKKPGSSVKVSCKTSGG |
| | | (weak), | OC43 | | | | Human Patient | | SFTSYVLSWVRQAPGQGLEWMGRIVP |
| | | SARS-CoV1, | | | | | | | NLGVANYAQKFQDRVTITADKSTTTAYL |
| | | SARS-CoV2 | | | | | | | ELRSLRSEDTAVYYCARDLYYDNGGYNY |
| | | (weak) | | | | | | | LDYWGPGTLVTVSS |
| mAb-127 | Ab | 229E | NL63, OC43 | | | S; Unk | B-cells; SARS-CoV1 | 805 | QVQLVESGGGLVQPGGSLRLSCAASGF |
| | | (weak), | | | | | Human Patient | | TFSNYNMVWVRQAPGKGLEWISYISSSS |
| | | HKU1 | | | | | | | STIYYADSVKGRFIISRDNAKNSLHLQMN |
| | | (weak), | | | | | | | SLRDEDTAVYYCVRDYCNSVSCYTYYYIG |
| | | SARS-CoV1, | | | | | | | MDVWGQGTTVTVSS |
| | | SARS-CoV2 | | | | | | | |
| | | (weak) | | | | | | | |
| mAb-128 | Ab | 229E | OC43 | | | S; Unk | B-cells; SARS-CoV1 | 806 | EVQLVQSGAEVKKPGASVKVSCKASGYS |
| | | (weak), | | | | | Human Patient | | STNYGFSWVRQAPGQGLEWMGWISV |
| | | HKU1, NL63 | | | | | | | HSGNANFAQKFQGRITMTTDTSTTTAY |
| | | (weak), | | | | | | | MELRNLRSDDTATYYCATSASSYSRYYFG |
| | | SARS-CoV1, | | | | | | | LDVWGQGTTVTVSS |
| | | SARS-CoV2 | | | | | | | |
| | | (weak) | | | | | | | |
| mAb-129 | Ab | HKU1, SARS- | 229E, NL63, | | | S; Unk | B-cells; SARS-CoV1 | 807 | EVQLLESGPGLVKPSQTLSLTCTVSNGFI |
| | | CoV1 | OC43 | | | | Human Patient | | SSGEYYWSWIRQSPGKGLEWIGYISHSG |
| | | (weak), | | | | | | | STYYNRSLKSRVTISLDTSRNQFSLNLSS |
| | | SARS-CoV2 | | | | | | | VTAADTAVYYCARDLAKWSYGYYYSGMD |
| | | (weak) | | | | | | | VWGQGTTVTVSS |
| mAb-13 | Ab | SARS-CoV1, | 229E, HKU1, | | | S; Unk | B-cells; SARS-CoV1 | 808 | QVQLVQSGAEVKKPGSSVKVSCKISGGT |
| | | SARS-CoV2 | NL63, OC43 | | | | Human Patient | | FKNSAFSWARQVPGQGFQWMGGIIP |
| | | | | | | | | | MFGVPHSVQMFQGRVTLTADESTSAVY |
| | | | | | | | | | MELSGLTSDDTAVYYCAREEYSGTVHNF |
| | | | | | | | | | FGMDVWGQGTTVTVSS |
| mAb-130 | Ab | HKU1 | 229E, OC43 | | | S; Unk | B-cells; SARS-CoV1 | 809 | EVQLVESGGGLVQPGRSLRLSCAASGFT |
| | | (weak), | | | | | Human Patient | | FDDYAMHWVRQVPGRGLEWVSGISW |
| | | NL63 | | | | | | | NSGTINYADSVMGRFTISRDNAKNSLYL |
| | | (weak), | | | | | | | QMNSLRAEDTALYYCAKDGRYCSGISCR |
| | | SARS-CoV1 | | | | | | | TGMDVWGQGTTVTVSS |
| | | (weak), | | | | | | | |
| | | SARS-CoV2 | | | | | | | |
| | | (weak) | | | | | | | |
| mAb-131 | Ab | 229E | NL63, OC43 | | | S; Unk | B-cells; SARS-CoV1 | 810 | EVQLVESGGGLVQPGESLRLSCAASGFN |
| | | (weak), | | | | | Human Patient | | FSPYGMNWVRQAPGKGLEWIAYIISGS |
| | | HKU1 | | | | | | | GTIYYADSVKGRFTISRDNAQSSLYLQM |
| | | (weak), | | | | | | | NSLRAEDTAVYYCARGLLDYLHDAFDIW |
| | | SARS-CoV1 | | | | | | | GQGTMVTVSS |
| | | (weak), | | | | | | | |
| | | SARS-CoV2 | | | | | | | |
| | | (weak) | | | | | | | |
| mAb-132 | Ab | 229E, HKU1 | OC43 | | | S; Unk | B-cells; SARS-CoV1 | 811 | EVQLQESGPGLVKPSETLSLTCAVSGGS |
| | | (weak), | | | | | Human Patient | | VSSDTDYWGWIRQPPGKGLEWIGSIHD |
| | | NL63 | | | | | | | SERTYYDPSLKSRVTISVDTSKNQFSLRL |
| | | (weak), | | | | | | | SSVTAADTALYFCASRHLDLLPIGSFDVW |
| | | SARS-CoV1 | | | | | | | GRGTMVTVSS |
| | | (weak), | | | | | | | |
| | | SARS-CoV2 | | | | | | | |
| | | (weak) | | | | | | | |
| mAb-133 | Ab | HKU1 | 229E, NL63, | | | S; Unk | B-cells; SARS-CoV1 | 812 | QVQLLESGGGLVQPGRSLRLSCTASGFR |
| | | (weak), | OC43 | | | | Human Patient | | FGDYTMTWFRQAPGKGLEWVGFIRSIA |
| | | SARS-CoV1 | | | | | | | YGGTTEHAASVEGRFIISRDDSKSIAYLQ |
| | | (weak), | | | | | | | MNSLKAEDTGVYFCTRGSGMFYGSSSG |
| | | SARS-CoV2 | | | | | | | MDVWGQGTTVTVSS |
| | | (weak) | | | | | | | |
| mAb-134 | Ab | 229E | NL63, OC43 | | | S; Unk | B-cells; SARS-CoV1 | 813 | EVQLLESGAEVKKPGSSVKVSCKTSGGT |
| | | (weak), | | | | | Human Patient | | FNSYTISWVRQAPGQGLEWMGGIIPIL |
| | | HKU1 | | | | | | | DTPHYAQKFRGRVTITADKSTSTAFMDL |
| | | (weak), | | | | | | | SSLTSEDTAVYYCAIRRDYSDYRDFDYW |
| | | SARS-CoV1 | | | | | | | GQGTLVTVSS |
| | | (weak), | | | | | | | |
| | | SARS-CoV2 | | | | | | | |
| | | (weak) | | | | | | | |
| mAb-135 | Ab | HKU1 | 229E, NL63, | | | S; Unk | B-cells; SARS-CoV1 | 814 | EVQLVESGPGLVKPSETLSLACTVSGGSI |
| | | (weak), | OC43 | | | | Human Patient | | SNYYWNWVRQPPGKGLEWIGNIYYSGS |
| | | SARS-CoV1 | | | | | | | TTFNPSLKSRVTISVDTSRNQFSLKLSSV |
| | | (weak), | | | | | | | TAADTAVYYCARQSSSWYNPYYFDQWG |
| | | SARS-CoV2 | | | | | | | QGTLVTVSS |
| | | (weak) | | | | | | | |
| mAb-136 | Ab | HKU1, SARS- | 229E, NL63, | | | S; Unk | B-cells; SARS-CoV1 | 815 | QVQLVQSGGGLVQPGESLRLSCAASGF |
| | | CoV1 | OC43 | | | | Human Patient | | NFSPYGMNWVRQAPGKGLEWIAYIISG |
| | | (weak), | | | | | | | SGTIYYADSVKGRFTISRDNAQSSLYLQM |
| | | SARS-CoV2 | | | | | | | NSLRAEDTAVYYCARGLLDYLHDAFDIW |
| | | (weak) | | | | | | | GQGTMVTVSS |
| mAb-137 | Ab | HKU1, SARS- | 229E, NL63, | | | S; Unk | B-cells; SARS-CoV1 | 816 | EVQLVESGAEVKNPGSSVKISCKSSGGTL |
| | | CoV1 | OC43 | | | | Human Patient | | GDYAISWVRQAPGLGLEWLGGIMPLH |
| | | (weak), | | | | | | | GTTGYSQRFRPRLTITADESARTAYMELT |
| | | SARS-CoV2 | | | | | | | ALSSEDSAIYYCARDPSILNTGNHHWYD |
| | | (weak) | | | | | | | LDLWGQGTEVTVSS |
| mAb-138 | Ab | HKU1 | 229E, NL63, | | | S; Unk | B-cells; SARS-CoV1 | 817 | EVQLLESGGGVVQPGRSLRLSCAASGFT |
| | | (weak), | OC43 | | | | Human Patient | | FNSYALFWVRQAPGKGLEWVAVVSYD |
| | | SARS-CoV1 | | | | | | | GNNKYYADSVKGRFTISRDNSKNTLYLQ |
| | | (weak), | | | | | | | MNSLKTEDTSVYYCARPRSGSYRQAIDY |
| | | SARS-CoV2 | | | | | | | WGLGTLVTVSS |
| | | (weak) | | | | | | | |
| mAb-139 | Ab | 229E, HKU1 | OC43 | | | S; Unk | B-cells; SARS-CoV1 | 818 | QVQLVQSGGGLVQPGGSLRLSCAASGFI |
| | | (weak), | | | | | Human Patient | | FSGHWMSWVRQAPGKGLEWVANIKQ |
| | | NL63, SARS- | | | | | | | DGREKHYVDSVKGRFTISRDNAKNSVSL |
| | | CoV1 | | | | | | | QMNSLRAEDTAVYYCVRQNVAIQYYYY |
| | | (weak), | | | | | | | AMDVWGQGTTVTVSS |
| | | SARS-CoV2 | | | | | | | |
| | | (weak) | | | | | | | |
| mAb-14 | Ab | SARS-CoV1, | 229E, HKU1, | | | S; Unk | B-cells; SARS-CoV1 | 819 | EVQLVESGGGVVQPGRSLRLSCAASGFT |
| | | SARS-CoV2 | NL63, OC43 | | | | Human Patient | | FSGYPMHWVRQAPGKGLEWVALISFD |
| | | | | | | | | | GDSKYYTDSVKARFAISRDNSKNTLFLQ |
| | | | | | | | | | MNSLRVADTALYYCARAKGGSYSNAFD |
| | | | | | | | | | YWGQGTLVTVSS |
| mAb-140 | Ab | 229E, HKU1 | OC43 | | | S; Unk | B-cells; SARS-CoV1 | 820 | QVQLVESGAEVKKPGSSVKVSCKASGGT |
| | | (weak), | | | | | Human Patient | | LSDYAISWVRQAPGQGLEWMGGIMPI |
| | | NL63, SARS- | | | | | | | FGSPGYAEIFQGRVTITADESKSTVYMEL |
| | | CoV1 | | | | | | | TSLRSEDTAVYYCARDPSILDTGNHHWY |
| | | (weak), | | | | | | | DLDIWGQGTMVTVSS |
| | | SARS-CoV2 | | | | | | | |
| | | (weak) | | | | | | | |
| mAb-141 | Ab | 229E, HKU1 | OC43 | | | S; Unk | B-cells; SARS-CoV1 | 821 | QVQLVQSGAEVKKPGSSVKVSCKTSGAT |
| | | (weak), | | | | | Human Patient | | YKNSAFSWARQAPGQGFQWMGGIIPL |
| | | NL63, SARS- | | | | | | | FGVPHYVQMFQGRVTITADESTSAVYM |
| | | CoV1 | | | | | | | ELSGLTSDDTAVYYCAREEYSGTVHNFF |
| | | (weak), | | | | | | | GMDVWGQGTTVTVSS |
| | | SARS-CoV2 | | | | | | | |
| | | (weak) | | | | | | | |
| mAb-142 | Ab | 229E, HKU1 | OC43 | | | S; Unk | B-cells; SARS-CoV1 | 822 | EVQLVESGGGLVQPGGSLRLSCSASEFT |
| | | (weak), | | | | | Human Patient | | LRSHAMHWVRQAPGKGLEYVSGISTDG |
| | | NL63, SARS- | | | | | | | SGRFYADSVKGRFTISRDNSKNKLFLQM |
| | | CoV1 | | | | | | | SSLRPEDTAVYYCVRDWGSSTHYDVFDL |
| | | (weak), | | | | | | | WGQGTMVTVSS |
| | | SARS-CoV2 | | | | | | | |
| | | (weak) | | | | | | | |
| mAb-143 | Ab | 229E, 229E | | | | S; Unk | B-cells; SARS-CoV1 | 823 | QVQLVQSGAEVKKPGSSVKVSCKASGG |
| | | (weak), | | | | | Human Patient | | TLADYAISWVRQAPGQGLEWMGGIKP |
| | | HKU1 | | | | | | | LHGAAGYSQHFRGRLSITADESASTAYM |
| | | (weak), | | | | | | | ELTGLRSEDTAMYYCARDPSILNTGNHH |
| | | NL63 | | | | | | | WYDLDLWGQGTMVTVSS |
| | | (weak), | | | | | | | |
| | | OC43 | | | | | | | |
| | | (weak), | | | | | | | |
| | | SARS-CoV1 | | | | | | | |
| | | (weak), | | | | | | | |
| | | SARS-CoV2 | | | | | | | |
| | | (weak) | | | | | | | |
| mAb-144 | Ab | 229E, HKU1, | OC43 | | | S; Unk | B-cells; SARS-CoV1 | 824 | QVQLVQSGAELKKPGSSVKVSCKASGG |
| | | NL63, SARS- | | | | | Human Patient | | TFYNSAFSWLRHAPGQGPEWMGGITP |
| | | CoV1 | | | | | | | SLGRVGYSERFLARLTITADESTSTVYME |
| | | (weak), | | | | | | | LTSLASEDTAVYYCARDASIVGTGNHLW |
| | | SARS-CoV2 | | | | | | | YGLDFWGHGTTVTVSS |
| | | (weak) | | | | | | | |
| mAb-145 | Ab | 229E, HKU1 | OC43 | | | S; Unk | B-cells; SARS-CoV1 | 825 | EVQLVESGGHVVLPGKSLRLSCAGSGFG |
| | | (weak), | | | | | Human Patient | | FPLYAMQWVRRAPGKGLEWVALVSYD |
| | | NL63, SARS- | | | | | | | SSNIRYADSVKGRFTISRDNSQNTLYLQ |
| | | CoV1 | | | | | | | MDSLRPEDTAMYYCARDNALQDGRPG |
| | | (weak), | | | | | | | YFDSWGQGTLVTVSS |
| | | SARS-CoV2 | | | | | | | |
| | | (weak) | | | | | | | |
| mAb-146 | Ab | 229E, HKU1 | OC43 | | | S; Unk | B-cells; SARS-CoV1 | 826 | EVQLVESGGGLVKPGGSLRLSCAASGFIF |
| | | (weak), | | | | | Human Patient | | SDYYMSWIRQAPGKGLEWVSYITGSGR |
| | | NL63, SARS- | | | | | | | TIHYADSVKGRFTISRDNAKNSVYLQMN |
| | | CoV1 | | | | | | | SLRAEDTAVYYCARGHRFLEFPLNYFDP |
| | | (weak), | | | | | | | WGQGTLVTVSS |
| | | SARS-CoV2 | | | | | | | |
| | | (weak) | | | | | | | |
| mAb-147 | Ab | 229E, HKU1 | OC43 | | | S; Unk | B-cells; SARS-CoV1 | 827 | EVQLLESGGHVVLPGKSLRLSCAGSGFG |
| | | (weak), | | | | | Human Patient | | FPLYAMQWVRRAPGKGLEWVALVSYD |
| | | NL63 | | | | | | | SSNIRYADSVKGRFTISRDNSQNTLYLQ |
| | | (weak), | | | | | | | MDSLRPEDTAMYYCARDNALQDGRPG |
| | | SARS-CoV1 | | | | | | | YFDSWGQGTLVTVSS |
| | | (weak), | | | | | | | |
| | | SARS-CoV2 | | | | | | | |
| | | (weak) | | | | | | | |
| mAb-148 | Ab | 229E, HKU1 | OC43 | | | S; Unk | B-cells; SARS-CoV1 | 828 | EVQLVESGGGVVQPGRSLRLSCAASGFT |
| | | (weak), | | | | | Human Patient | | FSKFAMHWVRQAPGKGLEWVAIISYDG |
| | | NL63 | | | | | | | SHKNYADSVKGRFTISRDNSKNTVYLQV |
| | | (weak), | | | | | | | DSLRAEDTAVYYCALLYGSGSYYNFVFFG |
| | | SARS-CoV1 | | | | | | | WKDGSDAWGPGTTVTVSS |
| | | (weak), | | | | | | | |
| | | SARS-CoV2 | | | | | | | |
| | | (weak) | | | | | | | |
| mAb-149 | Ab | 229E | OC43 | | | S; Unk | B-cells; SARS-CoV1 | 829 | QVQLVQSGAEVKKPGSSVKVSCKASGG |
| | | (weak), | | | | | Human Patient | | MFTDYAISWVRQAPGQRLEWMGGILP |
| | | HKU1, NL63 | | | | | | | AFAASGSPGYAPIFRGRATFSADVSTSTA |
| | | (weak), | | | | | | | YLELTNLKPEDTAVYYCARDPSILNTGNH |
| | | SARS-CoV1 | | | | | | | HWYDLDLWGQGTEVTVSS |
| | | (weak), | | | | | | | |
| | | SARS-CoV2 | | | | | | | |
| | | (weak) | | | | | | | |
| mAb-15 | Ab | SARS-CoV1, | 229E, HKU1, | | | S; Unk | B-cells; SARS-CoV1 | 830 | QVQLVQSGAELKKPGSSVRVSCKAAGG |
| | | SARS-CoV2 | NL63, OC43 | | | | Human Patient | | TLTNYAISWVRQAPGQGFEWMGGIMP |
| | | | | | | | | | VSHTAGYAQKFQGRVTFTADESATTAY |
| | | | | | | | | | MDLTSLRPEDTAIYYCARDPSIHYTGNH |
| | | | | | | | | | HWYDLDIWGQGTMVTVSS |
| mAb-150 | Ab | 229E | OC43 | | | S; Unk | B-cells; SARS-CoV1 | 831 | QVQLVQSGAELKKPGSSVRVSCKAAGG |
| | | (weak), | | | | | Human Patient | | TLTNYAISWVRQAPGQGFEWMGGIMP |
| | | HKU1 | | | | | | | VSHTAGYAQKFQGRVTFTADESATTAY |
| | | (weak), | | | | | | | MDLTSLRPEDTAIYYCARDPSIHYTGNH |
| | | NL63, SARS- | | | | | | | HWYDLDIWGQGTMVTVSS |
| | | CoV1 | | | | | | | |
| | | (weak), | | | | | | | |
| | | SARS-CoV2 | | | | | | | |
| | | (weak) | | | | | | | |
| mAb-151 | Ab | 229E | OC43 | | | S; Unk | B-cells; SARS-CoV1 | 832 | QVQLVQSGAEVKKPGSSMRVSCRVSG |
| | | (weak), | | | | | Human Patient | | GTFITHAMSWVRQAPGQGPEWMGGI |
| | | HKU1 | | | | | | | VPLFGRASYAQPSQTRVQITADESTSTVY |
| | | (weak), | | | | | | | LEVPSLTSEDTAVYYCVRDSEPYTATRSQ |
| | | NL63 | | | | | | | NHYWYDMDVWGQGTTVTVSS |
| | | (weak), | | | | | | | |
| | | SARS-CoV1 | | | | | | | |
| | | (weak), | | | | | | | |
| | | SARS-CoV2 | | | | | | | |
| | | (weak) | | | | | | | |
| mAb-152 | Ab | 229E | OC43 | | | S; Unk | B-cells; SARS-CoV1 | 833 | QVQLVQSGAELKKPGSSVRVSCKAAGG |
| | | (weak), | | | | | Human Patient | | TLTNYAISWVRQAPGQGFEWMGGIMP |
| | | HKU1 | | | | | | | VSHTAGYAQKFQGRVTFTADESATTAY |
| | | (weak), | | | | | | | MDLTSLRPEDTAIYYCARDPSIHYTGNH |
| | | NL63 | | | | | | | HWYDLDIWGQGTTVTVSS |
| | | (weak), | | | | | | | |
| | | SARS-CoV1 | | | | | | | |
| | | (weak), | | | | | | | |
| | | SARS-CoV2 | | | | | | | |
| | | (weak) | | | | | | | |
| mAb-153 | Ab | 229E | OC43 | | | S; Unk | B-cells; SARS-CoV1 | 834 | QVQLVQSGAEVKKPGSSVKVSCKASGG |
| | | (weak), | | | | | Human Patient | | TLSHYAISWVRQAPGQGLEWMGGIMP |
| | | HKU1 | | | | | | | VSGTVGYAQKFQGRVKFTADEYASTAY |
| | | (weak), | | | | | | | MELTNLRSEDSAVYFCARDPSIVDSGPH |
| | | NL63 | | | | | | | HWYDLDIWGQGTMVTVSS |
| | | (weak), | | | | | | | |
| | | SARS-CoV1 | | | | | | | |
| | | (weak), | | | | | | | |
| | | SARS-CoV2 | | | | | | | |
| | | (weak) | | | | | | | |
| mAb-154 | Ab | 229E | OC43 | | | S; Unk | B-cells; SARS-CoV1 | 835 | QVQLVESGAEVKRPGASVKVSCKASGY |
| | | (weak), | | | | | Human Patient | | AFSDYYMHWVRQAPGQGPEWMGWI |
| | | HKU1 | | | | | | | NPNSGDTGYPQKFRGWVTMTRDTSVS |
| | | (weak), | | | | | | | TAYMELKRLKSDDTAVYYCASGPNYFDY |
| | | NL63 | | | | | | | WGQGTLVTVSS |
| | | (weak), | | | | | | | |
| | | SARS-CoV1 | | | | | | | |
| | | (weak), | | | | | | | |
| | | SARS-CoV2 | | | | | | | |
| | | (weak) | | | | | | | |
| mAb-155 | Ab | 229E | OC43 | | | S; Unk | B-cells; SARS-CoV1 | 836 | EVQLLESGGGLVKPGGSLRLSCEASGFTF |
| | | (weak), | | | | | Human Patient | | SNYNMNWVRQAPGKGLEWVSSISGSS |
| | | HKU1 | | | | | | | SYISYADSVKGRFTISRDNAKNSLYLQMN |
| | | (weak), | | | | | | | SLRVEDTAVYYCARADRDYDFWSDPPLI |
| | | NL63 | | | | | | | DHWGQGTLVTVSS |
| | | (weak), | | | | | | | |
| | | SARS-CoV1 | | | | | | | |
| | | (weak), | | | | | | | |
| | | SARS-CoV2 | | | | | | | |
| | | (weak) | | | | | | | |
| mAb-156 | Ab | 229E | NL63, OC43 | | | S; Unk | B-cells; SARS-CoV1 | 837 | EVQLVESGGGLIQPGGSLRLSCAASGFT |
| | | (weak), | | | | | Human Patient | | VTDNYMSWVRQAPGKGLEWVSVLYSG |
| | | HKU1 | | | | | | | GSTYYADAVQGRFSISRDNSKNALYLQM |
| | | (weak), | | | | | | | NSLRAEDTAVYYCARGFGNGWSYYFDY |
| | | SARS-CoV1 | | | | | | | WGQGTLVTVSS |
| | | (weak), | | | | | | | |
| | | SARS-CoV2 | | | | | | | |
| | | (weak) | | | | | | | |
| mAb-157 | Ab | HKU1, SARS | 229E, NL63, | | | S; Unk | B-cells; SARS-CoV1 | 838 | EVQLVQSGGGLVQPGGSLRLSCAASGF |
| | | CoV1 | OC43 | | | | Human Patient | | TFSSYSMSWVRQAPGKGLEWVSYITRSS |
| | | (weak), | | | | | | | DNIYYAESVKGRFTISRDSAKNSLYLHMN |
| | | SARS-CoV2 | | | | | | | SLRDEDTAVYYCARDPGLEYSGNYFSYYY |
| | | (weak) | | | | | | | YAMDVWGQGTTVTVSS |
| mAb-158 | Ab | HKU1, SARS- | 229E, NL63, | | | S; Unk | B-cells; SARS-CoV1 | 839 | QVQLVQSGAEVKKPGSSVKVSCKASGG |
| | | CoV1 | OC43 | | | | Human Patient | | TFSTHAISWVRQAPGHGPEWMGGIIPL |
| | | (weak), | | | | | | | FGTSESAQRFQARVRFTADESTSTAYME |
| | | SARS-CoV2 | | | | | | | LSSLTSEDTAVYYCVRDSDPYTATSRNNH |
| | | (weak) | | | | | | | YWYDMDVWGQGTTVTVSS |
| mAb-159 | Ab | HKU1, SARS- | 229E, NL63, | | | S; Unk | B-cells; SARS-CoV1 | 840 | QVQLVQSGAEVKKPGSSVKVSCKVSGG |
| | | CoV1 | OC43 | | | | Human Patient | | RFSDYAISWLRQAPVKGLEWMGGIIPRL |
| | | (weak), | | | | | | | NRKGYSQDFQGRLTFTADESTSTAYMEL |
| | | SARS-CoV2 | | | | | | | SGLTSEDTAVYYCARDPTFLNSGNHFWY |
| | | (weak) | | | | | | | AVDIWGQGTTVTVSS |
| mAb-16 | Ab | SARS-CoV1, | 229E, HKU1, | | | S; Unk | B-cells; SARS-CoV1 | 841 | EVQLVESGAEVRTPGSSVKLSCKASGGT |
| | | SARS-CoV2 | NL63, OC43 | | | | Human Patient | | FSTHAFSWVRQAPGQRPEWMGGIIPIF |
| | | | | | | | | | GESKDTQKFQGRVTFTADESTTTVYMEL |
| | | | | | | | | | RSLKSDDTAIYYCVRDSDPYTATYRNNHY |
| | | | | | | | | | WYAMDVWGQGTTVTVSS |
| mAb-160 | Ab | HKU1, SARS- | 229E, NL63, | | | S; Unk | B-cells; SARS-CoV1 | 842 | EVQLVESGGGVVKPGGSLRVSCVGSGF |
| | | CoV1 | OC43 | | | | Human Patient | | TFSDHYMSWIRQAPGKGLEIISYISTDGS |
| | | (weak), | | | | | | | YINDADSVKGRFINSRDNAKNSVYLQLN |
| | | SARS-CoV2 | | | | | | | SLRAEDTAVYYCARMGPSGSGSLDYWG |
| | | (weak) | | | | | | | QGSLVTVSS |
| mAb-161 | Ab | HKU1, SARS- | 229E, NL63, | | | S; Unk | B-cells; SARS-CoV1 | 843 | EVQLVESGPTLVKPTQTLTLTCTFSGFSL |
| | | CoV1 | OC43 | | | | Human Patient | | NTRELGVGWIRQPPGKALEWLALIYWD |
| | | (weak), | | | | | | | DDKRYSPSLKSRLSITKDTSKNQVVLTLT |
| | | SARS-CoV2 | | | | | | | NMDPGDTATYYCAHTSELPPRRPYAAF |
| | | (weak) | | | | | | | DFWGQGTLVTVSS |
| mAb-162 | Ab | HKU1 | 229E, NL63, | | | S; Unk | B-cells; SARS-CoV1 | 844 | EVQLVESGGGVVQPGGSLRLSCVASGF |
| | | (weak), | OC43 | | | | Human Patient | | PFGRYAMHWVRQAPGQGLEWLTLISF |
| | | SARS-CoV1 | | | | | | | DSSNIEYSDSVQGRFTISRDNSRNTLFLQ |
| | | (weak), | | | | | | | MTSLRPEDTAVYFCARDLPPLDYWGQG |
| | | SARS-CoV2 | | | | | | | TLVTVSS |
| | | (weak) | | | | | | | |
| mAb-163 | Ab | HKU1 | 229E, OC43 | | | S; Unk | B-cells; SARS-CoV1 | 845 | QVQLQQWGAGLLKPSETLSLTCAVNGG |
| | | (weak), | | | | | Human Patient | | SFNNYYWSWIRQPPGKGPEWIGEVVHS |
| | | NL63 | | | | | | | GSTTYNPSLKSRVTISIDMSKNQFALKLN |
| | | (weak), | | | | | | | SVTAADTAVYYCARGFTFTYSDFLTGQRI |
| | | SARS-CoV1 | | | | | | | FEYWGQGTLVTVSS |
| | | (weak), | | | | | | | |
| | | SARS-CoV2 | | | | | | | |
| | | (weak) | | | | | | | |
| mAb-164 | Ab | HKU1 | 229E, OC43 | | | S; Unk | B-cells; SARS-CoV1 | 846 | EVQLVESGGGVVQPGRSLRLSCAASGFT |
| | | (weak), | | | | | Human Patient | | FSSYAMHWVRQAPGKGLEWVALISYD |
| | | NL63 | | | | | | | GDKKYYPDSVRGRFTISRDNSKNTLHLQ |
| | | (weak), | | | | | | | MNSLRLEDTAVYYCARSYGGSYSTVGY |
| | | SARS-CoV1 | | | | | | | WGQGALVTVSS |
| | | (weak), | | | | | | | |
| | | SARS-CoV2 | | | | | | | |
| | | (weak) | | | | | | | |
| mAb-165 | Ab | HKU1 | 229E, OC43 | | | S; Unk | B-cells; SARS-CoV1 | 847 | QVQLVQSGGDSVNPGGSLRLSCAGSGF |
| | | (weak), | | | | | Human Patient | | SVRDVWMSWVRQAPGKGLEWIGRIKS |
| | | NL63 | | | | | | | EADGGSSDYRASLKDRFSIWRDASKNTL |
| | | (weak), | | | | | | | YLQVNGLQTEDTAIYFCSWNDVGWAFT |
| | | SARS-CoV1 | | | | | | | FWGQGTLVTVSS |
| | | (weak), | | | | | | | |
| | | SARS-CoV2 | | | | | | | |
| | | (weak) | | | | | | | |
| mAb-166 | Ab | HKU1 | 229E, NL63, | | | S; Unk | B-cells; SARS-CoV1 | 848 | QVQLVQSGAEVKKAGSSVKVSCKASGG |
| | | (weak), | OC43 | | | | Human Patient | | PFSSFAISWVRQAPGQGLEWLGGIMTV |
| | | SARS-CoV1 | | | | | | | FGPAHYAQKSRDRISITADESTSTSYLEL |
| | | (weak), | | | | | | | SSLTSDDTAVYYCAAEERSGTNHNYYGLD |
| | | SARS-CoV2 | | | | | | | VWGQGTTVTVSS |
| | | (weak) | | | | | | | |
| mAb-167 | Ab | HKU1 | 229E, NL63, | | | S; Unk | B-cells; SARS-CoV1 | 849 | EVQLVESGGGLIQPGGSLRLSCAASGFP |
| | | (weak), | OC43 | | | | Human Patient | | FSGTYMTWVRQAPGKGLEWVSIIYSGG |
| | | SARS-CoV1 | | | | | | | DTYYADSVKGRFTISRDNSKNTLFLQMN |
| | | (weak), | | | | | | | SLRVEDTAMYYCARDREMAIITERSYGL |
| | | SARS-CoV2 | | | | | | | DVWGQGTMVTVSS |
| | | (weak) | | | | | | | |
| mAb-168 | Ab | HKU1 | 229E, NL63, | | | S; Unk | B-cells; SARS-CoV1 | 850 | EVQLVESGGGLVQPGGSLRLSCGASGFT |
| | | (weak), | OC43 | | | | Human Patient | | FSDYAMSWVRQAPGKGLEWVSTISGSG |
| | | SARS-CoV1 | | | | | | | DKTYYADSLKGRFTNSRDNSKSTLYLQM |
| | | (weak), | | | | | | | TSLRAEDTAVYFCAKDRYCSGGSCFYDAF |
| | | SARS-CoV2 | | | | | | | DIWGQGTTVTVSS |
| | | (weak) | | | | | | | |
| mAb-169 | Ab | HKU1 | 229E, NL63, | | | S; Unk | B-cells; SARS-CoV1 | 851 | EVQLVESGGGVVQPGRSLRLSCEASGFT |
| | | (weak), | OC43 | | | | Human Patient | | FADYPMHWVRQAPGKGLEWVAVISSH |
| | | SARS-CoV1 | | | | | | | GRSQGYAASVKGRFTFSRDNSQSSLFLQ |
| | | (weak), | | | | | | | LNSLRVEDTAVYFCAREAQSSGRAGCLD |
| | | SARS-CoV2 | | | | | | | AWGQGTLVTVSS |
| | | (weak) | | | | | | | |
| mAb-17 | Ab | SARS-CoV1, | 229E, HKU1, | | | S; Unk | B-cells; SARS-CoV1 | 852 | QVQLVQSGAELKKPGSSVRVSCKAAGG |
| | | SARS-CoV2 | NL63, OC43 | | | | Human Patient | | TLTNYAISWVRQAPGQGFEWMGGIMP |
| | | | | | | | | | VSHTAGYAQKFQGRVTFTADESATTAY |
| | | | | | | | | | MDLTSLRPEDTAIYYCARDPSIHYTGNH |
| | | | | | | | | | HWYDLDIWGQGTMVTVSS |
| mAb-170 | Ab | HKU1 | 229E, NL63, | | | S; Unk | B-cells; SARS-CoV1 | 853 | QVQLVQSGAEVREPGSSVKLSCKTSGGT |
| | | (weak), | OC43 | | | | Human Patient | | FSTHAISWVRQAPGQRPEWMGGIMPI |
| | | SARS-CoV1 | | | | | | | FGESKDTQKFQGRVTFTADESTTTAYME |
| | | (weak), | | | | | | | LRSLKSDDTAIYYCVRDSDPYTATVRSNH |
| | | SARS-CoV2 | | | | | | | YWYAMDVWGQGTTVTVSS |
| | | (weak) | | | | | | | |
| mAb-171 | Ab | HKU1 | 229E, NL63, | | | S; Unk | B-cells; SARS-CoV1 | 854 | EVQLVQSGAEVKKPGSSVKVSCKVSGG |
| | | (weak), | OC43 | | | | Human Patient | | RFSDYAISWLRQAPVKGLEWMGGIIPRL |
| | | SARS-CoV1 | | | | | | | NRKGYSQDFQGRLTFTADESTSTAYMEL |
| | | (weak), | | | | | | | SGLTSEDTAVYYCARDPTFLNSGNHFWY |
| | | SARS-CoV2 | | | | | | | AVDIWGQGTTVTVSS |
| | | (weak) | | | | | | | |
| mAb-172 | Ab | HKU1 | 229E, NL63, | | | S; Unk | B-cells; SARS-CoV1 | 855 | QVQLQESGRGLVKPSETLSLTCTVSGGSI |
| | | (weak), | OC43 | | | | Human Patient | | TSSRYYWGWIRQPPGRNLEWIGSIHYS |
| | | SARS-CoV1 | | | | | | | GTTSYNPSLWSRVAISVDTAQNQFSLRL |
| | | (weak), | | | | | | | NSVTAADTAVYYCAAPAPSNHESWSGT |
| | | SARS-CoV2 | | | | | | | DWFDPWGQGILVTVSS |
| | | (weak) | | | | | | | |
| mAb-173 | Ab | HKU1 | 229E, NL63, | | | S; Unk | B-cells; SARS-CoV1 | 856 | QVQLVQSGAEVKGPGASVKVSCKVSGY |
| | | (weak), | OC43 | | | | Human Patient | | SFITYDITWVRQAPGQGLEWMGWISTK |
| | | SARS-CoV1 | | | | | | | SGDTRYAQNVQGRVTMTTDTSTNTAY |
| | | (weak), | | | | | | | MELRNLKSDDTALYYCARTTPRGWEQ |
| | | SARS-CoV2 | | | | | | | WPVLEYWGQGTLVTVSS |
| | | (weak) | | | | | | | |
| mAb-174 | Ab | HKU1 | 229E, NL63, | | | S; Unk | B-cells; SARS-CoV1 | 857 | EVQLVESGGGLVQPGGSLRLSCEASGFN |
| | | (weak), | OC43 | | | | Human Patient | | FNSYSMSWVRQAPGKGLEWLSYISSRSS |
| | | SARS-CoV1 | | | | | | | TIKYASSVQGRFTVSRDNAKKSVYLQMN |
| | | (weak), | | | | | | | SLRDEDTAVYFCARELDSETYYNYNSLDV |
| | | SARS-CoV2 | | | | | | | WGQGTTVTVSS |
| | | (weak) | | | | | | | |
| mAb-175 | Ab | HKU1 | 229E, NL63, | | | S; Unk | B-cells; SARS-CoV1 | 858 | QVQLVESGGEVKKPGASVKVSCKASGY |
| | | (weak), | OC43 | | | | Human Patient | | TLSSYPISWVRQAPGHGLEWMGWINT |
| | | SARS-CoV1 | | | | | | | YNGRTNYEQMLQGRVTMTTDTSTSTAY |
| | | (weak), | | | | | | | MELRSLRSDDTAVYYCARVVFRHGQYD |
| | | SARS-CoV2 | | | | | | | DSSGRLAFDIWGQGTMVTVSS |
| | | (weak) | | | | | | | |
| mAb-176 | Ab | HKU1 | 229E, NL63, | | | S; Unk | B-cells; SARS-CoV1 | 859 | QVQLVQSGAELKKPGSSVRVSCKAAGG |
| | | (weak), | OC43 | | | | Human Patient | | TLTNYAISWVRQAPGQGFEWMGGIMP |
| | | SARS-CoV1 | | | | | | | VSHTAGYAQKFQGRVTFTADESATTAY |
| | | (weak), | | | | | | | MDLTSLRPEDTAIYYCARDPSIHYTGNH |
| | | SARS-CoV2 | | | | | | | HWYDLDIWGQGTMVTVSS |
| | | (weak) | | | | | | | |
| mAb-177 | Ab | HKU1 | 229E, NL63, | | | S; Unk | B-cells; SARS-CoV1 | 860 | EVQLLESGAEVKKPGSSVKVSCKTSGGT |
| | | (weak), | OC43 | | | | Human Patient | | FSTHAISWVRQAPGQGPEWMGGIIPLF |
| | | SARS-CoV1 | | | | | | | GTSEHAQRFQARVKFTADESTSTAYMEL |
| | | (weak), | | | | | | | SSLTPEDTAVYYCVRDSDPYTATSRNNH |
| | | SARS-CoV2 | | | | | | | YWYGMDVWGQGTTVTVSS |
| | | (weak) | | | | | | | |
| mAb-178 | Ab | SARS-CoV1 | 229E, HKU1, | | | S; Unk | B-cells; SARS-CoV1 | 861 | EVQLLESGGGVVQPGTSLRLSCAVSGF |
| | | (weak), | NL63, OC43 | | | | Human Patient | | MFKNYAIHWVRQAPGKGLEWVAVISF |
| | | SARS-CoV2 | | | | | | | DGSDISYTESVQGRFTISRDNSENMLYL |
| | | (weak) | | | | | | | QMNSLRAEDTAMYYCAREPDGIGAAGI |
| | | | | | | | | | SGYWGQGTLVTVSS |
| mAb-179 | Ab | SARS-CoV1 | 229E, HKU1, | | | S; Unk | B-cells; SARS-CoV1 | 862 | EVQLVESGGGLVKPGGSLRLSCVASGFT |
| | | (weak), | NL63, OC43 | | | | Human Patient | | FSDFYMSWIRQAPGKGLEWVSYISGSG |
| | | SARS-CoV2 | | | | | | | DTIYYADSVKGRFTVSRDNAKNSLFLQM |
| | | (weak) | | | | | | | SSLGAEDTAMYYCAREMATSFGYYFVLD |
| | | | | | | | | | VWGQGTTVTVSS |
| mAb-18 | Ab | SARS-CoV1, | 229E, HKU1, | | | S; Unk | B-cells; SARS-CoV1 | 863 | QVQLQQWGAGLLKPSETLSLSCAVYGG |
| | | SARS-CoV2 | NL63, OC43 | | | | Human Patient | | SFSGFYWSWIRQPPGKGLEWIGEINHS |
| | | | | | | | | | GSANYNPSLMSRVTISMDTSKKQFSLQL |
| | | | | | | | | | RSVTAADTAVYYCARGQESPIVGVTGR |
| | | | | | | | | | WFDPWGQGTLVTVSS |
| mAb-180 | Ab | SARS-CoV1 | 229E, HKU1, | | | S; Unk | B-cells; SARS-CoV1 | 864 | EVQLVESGGGVVQPGRSLRLSCAASEFT |
| | | (weak), | NL63, OC43 | | | | Human Patient | | FSTYAMHWVRQAPGKGLEWVALISYD |
| | | SARS-CoV2 | | | | | | | GINKYYADSVKGRFAISRDNSKNTLYLQV |
| | | (weak) | | | | | | | NSLRADDTAVYYCVRPYSGSYTNWFDL |
| | | | | | | | | | WGQGTLVTVSS |
| mAb-181 | Ab | SARS-CoV1 | 229E, HKU1, | | | S; Unk | B-cells; SARS-CoV1 | 865 | QVQLVQSGAEVKKPGSSVKVSCKASGG |
| | | (weak), | NL63, OC43 | | | | Human Patient | | MLSDYAISWVRQAPGQRLEWMGGIM |
| | | SARS-CoV2 | | | | | | | PAFGSPGYAQIFRGRATISADVSTSTAYL |
| | | (weak) | | | | | | | ELTSLKPEDTAVYYCARDPSILNTGNHH |
| | | | | | | | | | WYDLDIWGQGTMVTVSS |
| mAb-182 | Ab | 229E | NL63, OC43, | | | S; Unk | B-cells; SARS-CoV1 | 866 | QVQLVQSGAEVKMPGSSVKVSCKVSG |
| | | (weak), | SARS-CoV1 | | | | Human Patient | | GRFSDYAISWLRQAPLEGLEWMGGIVP |
| | | HKU1 | | | | | | | HLNRKGYSQKFQDRLTFTADDSTSTAYM |
| | | (weak), | | | | | | | ELSGLTSEDTAVYYCARDPTFLNTGNHF |
| | | SARS-CoV2 | | | | | | | WYAVDIWGQGTTVTVSS |
| | | (weak) | | | | | | | |
| mAb-183 | Ab | HKU1, SARS- | 229E, NL63, | | | S; Unk | B-cells; SARS-CoV1 | 867 | QVQLVQSGAEVKKPGSSVKVSCKASGG |
| | | CoV2 | OC43, SARS- | | | | Human Patient | | TFSTHAISWVRQAPGHGPEWLGGILPLF |
| | | (weak) | CoV1 | | | | | | GTSESAQRFQARVKITADESTSTAYMELS |
| | | | | | | | | | SLTSEDTAVYYCVRDSDPYTATSRNNHY |
| | | | | | | | | | WYAMDVWGQGTTVTVSS |
| mAb-184 | Ab | HKU1 | 229E, NL63, | | | S; Unk | B-cells; SARS-CoV1 | 868 | QVQLVQSGAEVKKPGSSVKVSCKVSGG |
| | | (weak), | OC43, SARS- | | | | Human Patient | | TFSNYAISWLRQAPGQGPEWMGGIIPA |
| | | SARS-CoV2 | CoV1 | | | | | | LSRVGYVRKFQARLTISADELTTTAYMDL |
| | | (weak) | | | | | | | SSLTSEDTAVYYCARDPSFLNTGNHFWY |
| | | | | | | | | | DFDLWGQGTTVTVSS |
| mAb-185 | Ab | SARS-CoV2 | 229E, HKU1, | | | S; Unk | B-cells; SARS-CoV1 | 869 | QVQLQQWGAGLLKPSETLSLTCAVYGG |
| | | (weak) | NL63, OC43, | | | | Human Patient | | SFSGFYWTWIRQPPGKGLEWIGEINHS |
| | | | SARS-CoV1 | | | | | | GSSNYDLSLKSRVTMSVDTSKNQFSLKLS |
| | | | | | | | | | SVTAADTAVYYCARGMISPRIPRTTRQR |
| | | | | | | | | | WFDTWGQGTLVTVSS |
| mAb-186 | Ab | SARS-CoV2 | 229E, HKU1, | | | S; Unk | B-cells; SARS-CoV1 | 870 | QVQLQQWGAGLLKPSETLSLTCGVYGG |
| | | (weak) | NL63, OC43, | | | | Human Patient | | SFSGYFWSWIRQSPGKGLEWIGEINHSR |
| | | | SARS-CoV1 | | | | | | SMSYNPSLKSRITMSVDTSKNQFSLNLN |
| | | | | | | | | | SVTAADTAVYFCARGKAHRNDFWSGYY |
| | | | | | | | | | PHWFDPWGQGILVTVSS |
| mAb-187 | Ab | SARS-CoV2 | 229E, HKU1, | | | S; Unk | B-cells; SARS-CoV1 | 871 | QVQLVQSGAEVKKPGSSVKISCKISGDTF |
| | | (weak) | NL63, OC43, | | | | Human Patient | | STNAISWLRQAPGREPEWMGGIVPLVG |
| | | | SARS-CoV1 | | | | | | PASYAQRPQGRLTITADEFTNTAYLELNS |
| | | | | | | | | | LRSEDTATYYCARDSDPYTATRRHNHYW |
| | | | | | | | | | YAMDVWGQGTTVTVSS |
| mAb-188 | Ab | SARS-CoV2 | 229E, HKU1, | | | S; Unk | B-cells; SARS-CoV1 | 872 | EVQLLESGPGLVKPSETLSLTCTVSGGSI |
| | | (weak) | NL63, OC43, | | | | Human Patient | | NSQYWNWIRQSPGKGLEWIGYVYYSGS |
| | | | SARS-CoV1 | | | | | | TNYNPSLKSRVTMSVDTSKNHFSLNLRS |
| | | | | | | | | | VTAADTAVYYCARGLVVRYFDGFPSGPII |
| | | | | | | | | | GAFDIWNQGTTVTVSS |
| mAb-189 | Ab | SARS-CoV2 | 229E, HKU1, | | | S; Unk | B-cells; SARS-CoV1 | 873 | QVQLVQSGAEVKKPGSSVKVSCKVSGG |
| | | (weak) | NL63, OC43, | | | | Human Patient | | TFSSHAISWVRQAPGQRPEWMGGIMP |
| | | | SARS-CoV1 | | | | | | IFGESKDTQKFQGRVTFTVDESTNTAYM |
| | | | | | | | | | ELTSLKSEDTAIYYCVRDPDPYTATVRHN |
| | | | | | | | | | HYWHGMDVWGQGTTVTVSS |
| mAb-19 | Ab | OC43, SARS- | 229E, HKU1, | | | S; Unk | B-cells; SARS-CoV1 | 874 | QVQLQQWGAGLLKPSETLSLTCAVYGG |
| | | CoV1, SARS- | NL63 | | | | Human Patient | | SFSGFHWSWIRQPPGKGLEWIGEVNHS |
| | | CoV2 | | | | | | | GSTKYNPSLKSRVTVSVDTSKNQFSLRLS |
| | | | | | | | | | SVTAADTAIYYCARGSLSREYDFLTAPQN |
| | | | | | | | | | GPWFDSWGQGALVTVSS |
| mAb-190 | Ab | SARS-CoV2 | 229E, HKU1, | | | S; Unk | B-cells; SARS-CoV1 | 875 | EVQLLESGPGLVKPSETLSLTCTVSGGSI |
| | | (weak) | NL63, OC43, | | | | Human Patient | | SSNNLYWGWIRQPPGKGLEWIGSIYYSG |
| | | | SARS-CoV1 | | | | | | STYYNPSLKSRVIIPVDTSKDQFSLRLSS |
| | | | | | | | | | VTAADTAVYYCARHSQKDIVLIPAAQSPI |
| | | | | | | | | | FDYWGQGTLVTVSS |
| mAb-191 | Ab | SARS-CoV2 | 229E, HKU1, | | | S; Unk | B-cells; SARS-CoV1 | 876 | EVQLVESGGGLVQPGGSLRLSCSASGFT |
| | | (weak) | NL63, OC43, | | | | Human Patient | | FSRYAMHWVRQAPGKGLEYVSAINLNG |
| | | | SARS-CoV1 | | | | | | DSTYYTDSVRGRFTISRDNSKNTLFLQMS |
| | | | | | | | | | NVRPEDTAFYYCVKDGGYYDSSGPGHW |
| | | | | | | | | | GQGTLVTVSS |
| mAb-192 | Ab | SARS-CoV2 | 229E, HKU1, | | | S; Unk | B-cells; SARS-CoV1 | 877 | QVQLVQSGGGVVQPGGSLRLSCADSG |
| | | (weak) | NL63, OC43, | | | | Human Patient | | NAFIANPMHWVRQAPGKGLEWLALIST |
| | | | SARS-CoV1 | | | | | | DGNNRHYADSVKGRFTFSRDNSKNSLYL |
| | | | | | | | | | QMDSLRPEDTGVYYCARESRSSGRAGC |
| | | | | | | | | | FDSWGQGTLVTVSS |
| mAb-193 | Ab | SARS-CoV2 | 229E, HKU1, | | | S; Unk | B-cells; SARS-CoV1 | 878 | QVQLVESGGGVVQPGTSLRLSCAATGF |
| | | (weak) | NL63, OC43, | | | | Human Patient | | TFTTYPMHWVRQAPGKGLEWVAVISY |
| | | | SARS-CoV1 | | | | | | DGMNQYYADFLKGRFTISRDNSKNTLYL |
| | | | | | | | | | QMNSLRADDTAVYYCARAYGGNYQNH |
| | | | | | | | | | FDHWGQGTLVTVSS |
| mAb-194 | Ab | SARS-CoV2 | 229E, HKU1, | | | S; Unk | B-cells; SARS-CoV1 | 879 | EVQLVQWGAGLLKPSETLSLRCAVYGGS |
| | | (weak) | NL63, OC43, | | | | Human Patient | | FNGFYWTWIRQAPGQGLEWIAEINHSG |
| | | | SARS-CoV1 | | | | | | TTNYNPSLKSRVTISIDTSKKQFSLSLKS |
| | | | | | | | | | VTAADTAMYFCARGTISPIVGVPTPVVPR |
| | | | | | | | | | RGRSWFDPWGQGTLVTVSS |
| mAb-195 | Ab | SARS-CoV2 | 229E, HKU1, | | | S; Unk | B-cells; SARS-CoV1 | 880 | QVQLVQSGAEVKKPGSSVKVSCKASGG |
| | | (weak) | NL63, OC43, | | | | Human Patient | | TFSTHAISWVRQAPGHGPEWLGGIIPLF |
| | | | SARS-CoV1 | | | | | | GTSESAQRFQARVKITADESTSTAYMELS |
| | | | | | | | | | SLTSEDTAVYYCVRDSDPYTATSRNNHY |
| | | | | | | | | | WYAMDVWGQGTTVTVSS |
| mAb-196 | Ab | SARS-CoV2 | 229E, HKU1, | | | S; Unk | B-cells; SARS-CoV1 | 881 | QVQLVQSGAEVREPGSSVKLSCKTSGGP |
| | | (weak) | NL63, OC43, | | | | Human Patient | | FSTHAFSWVRQAPGQRPEWMGGIMP |
| | | | SARS-CoV1 | | | | | | VFGESKDTQKFKGRVTFTADASTTTTYM |
| | | | | | | | | | ELRSLKSDDTAIYYCVRDSDPYTATSSHN |
| | | | | | | | | | HYWYAMDVWGQGTTVTVSS |
| mAb-197 | Ab | SARS-CoV2 | 229E, HKU1, | | | S; Unk | B-cells; SARS-CoV1 | 882 | QVQLVESGGGLVKPGGSLRLSCAASGFT |
| | | (weak) | NL63, OC43, | | | | Human Patient | | FSDYYMIWIRQAPGKGLEWLSYISHTAS |
| | | | SARS-CoV1 | | | | | | TIYYADSVKGRFTISRDNAKNSLFLQMNS |
| | | | | | | | | | LTAEDTAVYYCARDRGSGVIDPWGQGT |
| | | | | | | | | | LVTVSS |
| mAb-2 | Ab | SARS-CoV1, | 229E, HKU1, | | | S; Unk | B-cells; SARS-CoV1 | 883 | QVQLVESGGGLVQPGGSLRLSCSASGFT |
| | | SARS-CoV2 | NL63, OC43 | | | | Human Patient | | FSRFAMHWVRQAPGKGLEYVSAINLNG |
| | | | | | | | | | DSTYYTDSVRGRFTISRDNSKNTLYLQMS |
| | | | | | | | | | SVRPDDTAFYYCVKDGGYYDSSGPGHW |
| | | | | | | | | | GQGTLVTVSS |
| mAb-20 | Ab | OC43, SARS- | 229E, HKU1, | | | S; Unk | B-cells; SARS-CoV1 | 884 | EVQLVESGPGLVKPSETLSLTCTVSGASV |
| | | CoV1, SARS- | NL63 | | | | Human Patient | | TAGSSYWGWIRQPPGKGLEWIGYMFSS |
| | | CoV2 | | | | | | | GNTKYNPSLKSRVTISADTSKNQFSLRLS |
| | | | | | | | | | SVTAADTAVYFCARVGWVRYFDWSKPY |
| | | | | | | | | | YYFDLWGRGTLVTVSS |
| mAb-21 | Ab | SARS-CoV1, | 229E, HKU1, | | | S; Unk | B-cells; SARS-CoV1 | 885 | EVQLVESGGGLVQPGGSLRLSCAASGFT |
| | | SARS-CoV2 | NL63, OC43 | | | | Human Patient | | FSTSAMSWVRQAPGKGLEWVSRIGGG |
| | | | | | | | | | GGRTKYADSVKGRFTISRDNSKNTLYLQ |
| | | | | | | | | | MNSLRADDTAVYYCAKCDLVRYFDWLG |
| | | | | | | | | | EENNWFDPWGQGTLVTVSS |
| mAb-22 | Ab | SARS-CoV1, | 229E, HKU1, | | | S; Unk | B-cells; SARS-CoV1 | 886 | QVQLVQSGAEVRKPGSSVKLSCKASGG |
| | | SARS-CoV2 | NL63, OC43 | | | | Human Patient | | TFSTHAISWVRQAPGQRPEWMGGIMP |
| | | | | | | | | | IFGESKDTQKFQGRVTFTADESTTTAYM |
| | | | | | | | | | ELRSLKSDDTAIYYCVRDSDPYTATVRNN |
| | | | | | | | | | HYWYALDVWGPGTMVTVSS |
| mAb-23 | Ab | SARS-CoV1, | 229E, HKU1, | | | S; Unk | B-cells; SARS-CoV1 | 887 | EVQLVESGGGLSQPGGSLRLSCAASGFT |
| | | SARS-CoV2 | NL63, OC43 | | | | Human Patient | | VRTYCMNWVRQAPGKGLEWVSLVCG |
| | | | | | | | | | DNIDYYPDSVKGRFSISRDDSKNTLLLH |
| | | | | | | | | | MDSLRVEDTAVYYCARATPPGGGTGW |
| | | | | | | | | | PYFDFWGQGTLVTVSS |
| mAb-24 | Ab | SARS-CoV1 | 229E, HKU1, | | | S; Unk | B-cells; SARS-CoV1 | 888 | QVQLVQSGAEMRKPGSSVKVSCKASGG |
| | | (weak), | NL63, OC43 | | | | Human Patient | | TFSRYCFSWVRQAPGQRLEWMGGIMS |
| | | SARS-CoV2 | | | | | | | ILGAHYAQKFOGRVTFTADESTNTAYME |
| | | | | | | | | | LISLTSEDTAVYYCAREEPSGTYHNYYGL |
| | | | | | | | | | DVWGQGTTVTVSS |
| mAb-25 | Ab | SARS-CoV1, | 229E, HKU1, | | | S; Unk | B-cells; SARS-CoV1 | 889 | QVQLQESGPGLVKPSGTLSLTCAVSGGS |
| | | SARS-CoV2 | NL63, OC43 | | | | Human Patient | | ISSSDWCSWVRQPPGKGPEWIAEISHS |
| | | | | | | | | | GSTNYNPSLKSRVTMSVDRSKNQFSLNL |
| | | | | | | | | | NSVTAADTAVYYCAARIRGATHYDFWS |
| | | | | | | | | | GFWAGPFDIWGQGTTVTVSS |
| mAb-26 | Ab | SARS-CoV1, | 229E, HKU1, | | | S; Unk | B-cells; SARS-CoV1 | 890 | EVQLQESGPGLVKPSGTLSLTCGVSGVSI |
| | | SARS-CoV2 | NL63, OC43 | | | | Human Patient | | SSSSWWSWVRQPPGRGLEWIGEISPSG |
| | | | | | | | | | STSYNPSFRSRLTMSVDKSRNQLSLKLSS |
| | | | | | | | | | VTAADTAVYYCARTQSNDFWSGYYTAA |
| | | | | | | | | | FDLWGQGTMVTVSS |
| mAb-27 | Ab | SARS-CoV1, | 229E, HKU1, | | | S; Unk | B-cells; SARS-CoV1 | 891 | QVQLVQWGAGLLKPSETLSLTCAVYGG |
| | | SARS-CoV2 | NL63, OC43 | | | | Human Patient | | SFSGFHWSWIRQPPGKGLEWIGEINHS |
| | | | | | | | | | GSTKYNPSLKSRVTISVDTSKNQFSLRLR |
| | | | | | | | | | SVTAADTAIYYCARGSLSREYDFLTAPQN |
| | | | | | | | | | GPWFDSWGQGALVTVSS |
| mAb-28 | Ab | SARS-CoV1, | 229E, HKU1, | | | S; Unk | B-cells; SARS-CoV1 | 892 | EVQLVESGPELKKPGSSVRVSCKASGGS |
| | | SARS-CoV2 | NL63, OC43 | | | | Human Patient | | FSNFAVSWVRQAPGQRLEWMGGVIPR |
| | | | | | | | | | FGRSEYVQKFQGRVTITVDEAASTAYME |
| | | | | | | | | | LSSLRSEDTAIYYCVLDTTSANPHNWYG |
| | | | | | | | | | MDVWGQGTTVTVSS |
| mAb-29 | Ab | SARS-CoV1, | 229E, HKU1, | | | S; Unk | B-cells; SARS-CoV1 | 893 | QVQLVQSGGGVVNPGGSLRLSCVGSGF |
| | | SARS-CoV2 | NL63, OC43 | | | | Human Patient | | TFSDYYMGWIRQAPGKGLEVISYISSTGS |
| | | | | | | | | | YIRDADSVKGRFTISRDNAENSVYLQMN |
| | | | | | | | | | SLRGEDTAVYYCARMGPYGSGSFDYWG |
| | | | | | | | | | LGTLVTVSS |
| mAb-3 | Ab | SARS-CoV1, | 229E, HKU1, | | | S; Unk | B-cells; SARS-CoV1 | 894 | QVQLQESGPGLVRPSETLSLTCTVSGDS |
| | | SARS-CoV2 | NL63, OC43 | | | | Human Patient | | VSSSDYHWGWIRQPPGKGLEWIGSIYY |
| | | | | | | | | | GGRSHFNPSLKSRVAIFVDTSNNQFSLRL |
| | | | | | | | | | NSVTASDTAVYFCAGRHQELLPMGSFD |
| | | | | | | | | | MWAQGTTVTVSS |
| mAb-30 | Ab | SARS-CoV2 | 229E, HKU1, | | | S; Unk | B-cells; SARS-CoV1 | 895 | PGPACTVWAEVKKPGSSVKVSCKASGG |
| | | | NL63, OC43, | | | | Human Patient | | MFSDYAISWVRQAPGQRLEWMGGIM |
| | | | SARS-CoV1 | | | | | | PGLGSPGYAQIFRGRATISADVSTSTAYL |
| | | | | | | | | | ELTSLKPEDTAVYYCARDPSILNTGNHH |
| | | | | | | | | | WYDLDIWGQGTQVTVSS |
| mAb-31 | Ab | SARS-CoV2 | 229E, HKU1, | | | S; Unk | B-cells; SARS-CoV1 | 896 | QVQLVQSGAEVKKPGSSVKVSCKASGG |
| | | | NL63, OC43, | | | | Human Patient | | TSSTHAISWVRQAPGQGLEWMGGIIPIF |
| | | | SARS-CoV1 | | | | | | GTTNYAQKFQDRVTITADESTSTAYMEL |
| | | | | | | | | | SSLRSEDTAVYFCVRDGAYDSSGYYSTQ |
| | | | | | | | | | WGQGTLVTVSS |
| mAb-32 | Ab | SARS-CoV1, | 229E, HKU1, | | | S; Unk | B-cells; SARS-CoV1 | 897 | EVQLVQSGAEVKKPGSSVKVSCKVSGG |
| | | SARS-CoV2 | NL63, OC43 | | | | Human Patient | | RFSDYAISWLRQAPVKGLEWMGGIIPRL |
| | | | | | | | | | NRKGYSQDFQGRLTFTADESTSTAYMEL |
| | | | | | | | | | SGLTSEDTAVYYCARDPTFLNSGNHFWY |
| | | | | | | | | | AVDIWGQGTTVTVSS |
| mAb-33 | Ab | SARS-CoV1, | 229E, HKU1, | | | S; Unk | B-cells; SARS-CoV1 | 898 | QVQLVQSGAEVKKPGSSVTVSCKVSGG |
| | | SARS-CoV2 | NL63, OC43 | | | | Human Patient | | RFSDYAISWLRQAPVEGLEWMGGIIPHL |
| | | | | | | | | | NKKGYSQKFQDRITFTADESTSTAYMEL |
| | | | | | | | | | SGLTSEDTAIYYCARDPTFLNTGNHFWY |
| | | | | | | | | | AVDIWGQGTTVTVSS |
| mAb-34 | Ab | SARS-CoV1, | 229E, HKU1, | | | S; Unk | B-cells; SARS-CoV1 | 899 | QVQLVQSGAEVKKPGASVKVSCKASGY |
| | | SARS-CoV2 | NL63, OC43 | | | | Human Patient | | TFSLFHVHWVRQAPGQGLEWMGWIN |
| | | | | | | | | | PHNGDTTFAERFQGRVALTRDTSINTAY |
| | | | | | | | | | MELSRLTSDDTAVYFCARDFGVRYDDSR |
| | | | | | | | | | QLMKYCDSWGQGTLVTVSS |
| mAb-35 | Ab | SARS-CoV1, | 229E, HKU1, | | | S; Unk | B-cells; SARS-CoV1 | 900 | QVQLVQSGAEVKKPGSSVKVSCKASGG |
| | | SARS-CoV2 | NL63, OC43 | | | | Human Patient | | TLADYAISWVRQAPGQGLEWMGGIKP |
| | | | | | | | | | LHGAAGYSQLFRGRLSITADESASTAYM |
| | | | | | | | | | ELTGLTSDDTAMYYCARDPSILNTGNHH |
| | | | | | | | | | WYDLDLWGQGTTVTVSS |
| mAb-36 | Ab | SARS-CoV1, | 229E, HKU1, | | | S; Unk | B-cells; SARS-CoV1 | 901 | QVQLVQSGPELKKPGSSVRVSCKASGGS |
| | | SARS-CoV2 | NL63, OC43 | | | | Human Patient | | ISSYAISWVRQAPGQRLEWMGGVLPM |
| | | | | | | | | | MGRESPVQKFKDRVTIAADESTSTAYM |
| | | | | | | | | | ELRSLSAEDTAVYYCVVDTTMADPHNW |
| | | | | | | | | | YGLDVWGQGTTVTVSS |
| mAb-37 | Ab | SARS-CoV1, | 229E, HKU1, | | | S; Unk | B-cells; SARS-CoV1 | 902 | QVQLVQSGPGLVRPSGTLSLTCAVSGDS |
| | | SARS-CoV2 | NL63, OC43 | | | | Human Patient | | ISGDYWCTWVRQTPGKGLEWIGKISHS |
| | | | | | | | | | GSINYNPSLKSRITMSVDKSKNQFSLKLN |
| | | | | | | | | | SVTAADTAMYYCARVRVGASHHNFWS |
| | | | | | | | | | GYYTDAFDIWGQGTTVTVSS |
| mAb-38 | Ab | SARS-CoV1, | 229E, HKU1, | | | S; Unk | B-cells; SARS-CoV1 | 903 | QVQLVQSGAEVKKPGSSVKVSCKVSGG |
| | | SARS-CoV2 | NL63, OC43 | | | | Human Patient | | TFSNYAISWLRQAPGQGPEWMGGIIPA |
| | | | | | | | | | LSRVGYARKFQARLTISADELTTTAYMDL |
| | | | | | | | | | SSLTSEDTAVYYCARDPSFLNTGNHFWY |
| | | | | | | | | | DFDMWGQGTTVTVSS |
| mAb-39 | Ab | SARS-CoV2 | 229E, HKU1, | | | S; Unk | B-cells; SARS-CoV1 | 904 | EVQLQQSGAEVKKPGSSVKVSCKASGG |
| | | | NL63, OC43, | | | | Human Patient | | TSSTHAISWVRQAPGQGLEWMGGIIPIF |
| | | | SARS-CoV1 | | | | | | GTTNYAQKFQDRVTITADESTSTAYMEL |
| | | | | | | | | | SSLRSEDTAVYFCVRDGAYDSSGYYSTQ |
| | | | | | | | | | WGQGTLVTVSS |
| mAb-4 | Ab | SARS-CoV1, | 229E, HKU1, | | | S; Unk | B-cells; SARS-CoV1 | 905 | EVQLVESGGGLVKPGGSLRLSCAASGFT |
| | | SARS-CoV2 | NL63, OC43 | | | | Human Patient | | FSDYYMNWVRQAPGKGLEWVSSISSSS |
| | | | | | | | | | YMYYADSMKGRFTISRDNAQNSLYLQM |
| | | | | | | | | | SSLRAEDTAVYYCARDFPGDTAVAGTGF |
| | | | | | | | | | NYWGQGTLVTVSS |
| mAb-40 | Ab | SARS-CoV2 | 229E, HKU1, | | | S; Unk | B-cells; SARS-CoV1 | 906 | QVQLVESGGDLVKPGRSLRLSCTASGFTI |
| | | | NL63, OC43, | | | | Human Patient | | GDYAMTWFRQAPGKGLECVAVIRSRAF |
| | | | SARS-CoV1 | | | | | | GGTTEYAASVKGRFIVSRDDSNSVAFLQ |
| | | | | | | | | | MNSLKTEDTAVYYCSRDLRRGYYDSNG |
| | | | | | | | | | HQQFDLWGQGTLVTVSS |
| mAb-41 | Ab | SARS-CoV2 | 229E, HKU1, | | | S; Unk | B-cells; SARS-CoV1 | 907 | QVQLVESGGGVVQPGRSLRLSCAASGF |
| | | | NL63, OC43, | | | | Human Patient | | TFSRYGMHWVRQAPGKGLEWVAVIYS |
| | | | SARS-CoV1 | | | | | | DGRNEYYADSVKGRFTISRDNSKNTLHL |
| | | | | | | | | | QMNSLGAADTAVYYCARDPGPITFFDW |
| | | | | | | | | | SPDKSRKSYYDYNGMDVWGQGTTVTV |
| | | | | | | | | | SS |
| mAb-42 | Ab | SARS-CoV2 | 229E, HKU1, | | | S; Unk | B-cells; SARS-CoV1 | 908 | EVQLLESGGGVVQPGTSLRLSCVASGFT |
| | | | NL63, OC43, | | | | Human Patient | | FSTFAMHWVRQAPGKGLEWVALISFDS |
| | | | SARS-CoV1 | | | | | | TNIRYANSVRGRFTISRDNSKNTLYLEVD |
| | | | | | | | | | SLRIEDTGVYYCARDLPPLDYWGQGTLV |
| | | | | | | | | | TVSS |
| mAb-43 | Ab | SARS-CoV1, | 229E, HKU1, | | | S; Unk | B-cells; SARS-CoV1 | 909 | QVQLVQSGAEVRKPGSSVKLSCKASGG |
| | | SARS-CoV2 | NL63, OC43 | | | | Human Patient | | TFSTHAISWVRQAPGQRPEWMGGIIPIF |
| | | | | | | | | | GESKDTQKFQGRVTFTADESTTTAYMEL |
| | | | | | | | | | RSLRSDDTAIYYCVRDSDPYTTTFSHNHY |
| | | | | | | | | | WYAMDVWGQGTTVTVSS |
| mAb-44 | Ab | SARS-CoV1, | 229E, HKU1, | | | S; Unk | B-cells; SARS-CoV1 | 910 | QVQLVQSGGGLVQPGGSLRVSCSASGF |
| | | SARS-CoV2 | NL63, OC43 | | | | Human Patient | | TFSSFAMHWVRQAPGKGLEYVAGISDN |
| | | | | | | | | | GHTTMYADSVKGRFTISRDNSKNTLYLQ |
| | | | | | | | | | LSSLRPEDTAVYFCVKDNVILPGAIVRPQ |
| | | | | | | | | | FDYWGQGTLVTVSS |
| mAb-45 | Ab | SARS-CoV2 | 229E, HKU1, | | | S; Unk | B-cells; SARS-CoV1 | 911 | QVQLVQSGAEVKKPGSSVKVSCKVSGG |
| | | | NL63, OC43, | | | | Human Patient | | MFSDYAISWVRQAPGQRLEWMGGIM |
| | | | SARS-CoV1 | | | | | | PGLGSPAYAQIFRGRVTISADISTSTAYL |
| | | | | | | | | | EVTSLRPEDTAVYYCARDPSILNTGNHHW |
| | | | | | | | | | YDLDMWGQGTTVTVSS |
| mAb-46 | Ab | SARS-CoV1, | 229E, HKU1, | | | S; Unk | B-cells; SARS-CoV1 | 912 | EVQLVESGGGVVQPGRSLRLSCVASGFT |
| | | SARS-CoV2 | NL63, OC43 | | | | Human Patient | | LAPYGMQWVRQAPGKGLEWVAFLSH |
| | | | | | | | | | DGSHLGYVDSVKGRFTISRDNSKNTLYLE |
| | | | | | | | | | MNSLRAEDTATYYCARDNVVQQNADN |
| | | | | | | | | | VGYFDFWGQGSLVTVSS |
| mAb-47 | Ab | SARS-CoV1, | 229E, HKU1, | | | S; Unk | B-cells; SARS-CoV1 | 913 | QVQLVQSGAEVKKPGSSVKVSCKASGG |
| | | SARS-CoV2 | NL63, OC43 | | | | Human Patient | | MFRDYAISWLRQAPGQRLEWMGGIM |
| | | | | | | | | | PAFGAPGYAQIFRGRATISADVSTTTAYL |
| | | | | | | | | | ELTSLMPDDTAVYYCARDPSILNTGNHH |
| | | | | | | | | | WYDLDLWGQGTTVTVSS |
| mAb-48 | Ab | SARS-CoV1, | 229E, HKU1, | | | S; Unk | B-cells; SARS-CoV1 | 914 | QVTLKESGAEVKKPGSSVKVSCKTSGGT |
| | | SARS-CoV2 | NL63, OC43 | | | | Human Patient | | FSTHAISWVRQAPGQGPEWMGGIIPLF |
| | | | | | | | | | GTSQHAQRFQARVKFTADESTNTAYME |
| | | | | | | | | | LSSLTPEDTAVYYCVRDSDPYTATSRNNH |
| | | | | | | | | | YWYGMDVWGHGTTVTVSS |
| mAb-49 | Ab | SARS-CoV1, | 229E, HKU1, | | | S; Unk | B-cells; SARS-CoV1 | 915 | QVQLVQSGAEVKKPGSSVKVSCKASGG |
| | | SARS-CoV2 | NL63, OC43 | | | | Human Patient | | MFSDYAISWVRQAPGQRLEWMGGIM |
| | | | | | | | | | PGLGSPAYAQSFGGRVTISADISTSTAYL |
| | | | | | | | | | EVTSLRPEDTAVYYCARDPSILNTGNHH |
| | | | | | | | | | WYDLDMWGQGTMVTVSS |
| mAb-5 | Ab | SARS-CoV1, | 229E, HKU1, | | | S; Unk | B-cells; SARS-CoV1 | 916 | EVQLVESGGGLVQPGRSLRLSCSASGFS |
| | | SARS-CoV2 | NL63, OC43 | | | | Human Patient | | FGDYAMSWFRQAPGKGLQWVGLIKTR |
| | | | | | | | | | AYGAATDYAASVQGRFIISRDDSKSIAYL |
| | | | | | | | | | QMNSLKTEDTAVYFCAREGTSLGYYYYY |
| | | | | | | | | | AMDVWGHGTTVTVSS |
| mAb-50 | Ab | SARS-CoV1, | 229E, HKU1, | | | S; Unk | B-cells; SARS-CoV1 | 917 | QVQLVQSGAEVKKPGSSVKVSCKASGG |
| | | SARS-CoV2 | NL63, OC43 | | | | Human Patient | | MFSDYAISWVRQAPGQRLEWMGGIM |
| | | | | | | | | | PGLGSPAYAQIFRGRVTISADISTSTAYL |
| | | | | | | | | | EVTSLRPEDTAVYYCARDPSILNTGNHHW |
| | | | | | | | | | YDLDMWGQGTTVTVSS |
| mAb-51 | Ab | SARS-CoV1, | 229E, HKU1, | | | S; Unk | B-cells; SARS-CoV1 | 918 | EVQLVESGGGLVQPGGSLRLSCLTSGFS |
| | | SARS-CoV2 | NL63, OC43 | | | | Human Patient | | FSSYWMIWVRQAPGKGLEWVANIEPD |
| | | | | | | | | | GNEEYYVDSVKGRFTISRDNAKNSLYLQ |
| | | | | | | | | | MNSLRAEDTAVYYCARGPIRHFGLDAFD |
| | | | | | | | | | IWGQGTTVTVSS |
| mAb-52 | Ab | SARS-CoV2 | 229E, HKU1, | | | S; Unk | B-cells; SARS-CoV1 | 919 | QVQLVQSGDEMKKPGSSVKVSCKASGD |
| | | | NL63, OC43, | | | | Human Patient | | TFSTHAISWVRQAPGQGPEWMGGIIPL |
| | | | SARS-CoV1 | | | | | | FGTASYAQTSQSRVKITADESTSTAYMEL |
| | | | | | | | | | SSLTSEDTAVYYCVRDSDPYTATSRNNHY |
| | | | | | | | | | WYGMDVWGQGTTVTVSS |
| mAb-53 | Ab | SARS-CoV1, | 229E, HKU1, | | | S; Unk | B-cells; SARS-CoV1 | 920 | QVQLVQSGAEVKKPGSSVKVSCKASGG |
| | | SARS-CoV2 | NL63, OC43 | | | | Human Patient | | MFSDYAISWVRQAPGQRLEWMGGIM |
| | | | | | | | | | PGLGSPAYAQSFGGRVTISADISTSTAYL |
| | | | | | | | | | EVTSLRPEDTAVYYCARDPSILNTGNHH |
| | | | | | | | | | WYDLDMWGQGTMVTVSS |
| mAb-54 | Ab | SARS-CoV1, | 229E, HKU1, | | | S; Unk | B-cells; SARS-CoV1 | 921 | EVQLVESGGGLVQPGGSLRLSCSASGFT |
| | | SARS-CoV2 | NL63, OC43 | | | | Human Patient | | FSNYAMYWVRQAPGKRPEYVSGISSNG |
| | | | | | | | | | GITYYADSVEGRFTVSRDNSKKSLYLQM |
| | | | | | | | | | SSLRPEDTAVYYCVKDLGATVTYDVFDV |
| | | | | | | | | | WGQGTMVTVSS |
| mAb-55 | Ab | SARS-CoV2 | 229E, HKU1, | | | S; Unk | B-cells; SARS-CoV1 | 922 | EVQLVESGGGLVQPGGSLRLSCAASGFT |
| | | | NL63, OC43, | | | | Human Patient | | FSSYSMSWVRQAPGKGLEWVSGHDGG |
| | | | SARS-CoV1 | | | | | | TTHYADSVKGRFTISRDDSMNTLSLQM |
| | | | | | | | | | NSLRAEDTAVYYCAKERDLPGRGGYFDH |
| | | | | | | | | | WGQGTLVTVSS |
| mAb-56 | Ab | SARS-CoV2 | 229E, HKU1, | | | S; Unk | B-cells; SARS-CoV1 | 923 | QVQLQQWGAGLLKPSETLSLTCAVYGG |
| | | | NL63, OC43, | | | | Human Patient | | SFRGFYWTWIRQPPGKGLEWIGEVSHS |
| | | | SARS-CoV1 | | | | | | GETNYNPSLKSRVTISVDTSKNQFSLNLI |
| | | | | | | | | | SVTAADTSVYYCARGYTAPIIREVPITFR |
| | | | | | | | | | PRWFDPWGQGTPVTVSS |
| mAb-57 | Ab | SARS-CoV1, | 229E, HKU1, | | | S; Unk | B-cells; SARS-CoV1 | 924 | QVQLVQSGGGVVNPGGSMRLSCAGSG |
| | | SARS-CoV2 | NL63, OC43 | | | | Human Patient | | FTFSDHYMGWIRQAPGKGLEVISYISSS |
| | | | | | | | | | GSFIRDADSVKGRFTISRDNAKNSVYLQ |
| | | | | | | | | | MNSLRAEDTAVYYCARMGPYGSGTFDY |
| | | | | | | | | | WGQGTLVTVSS |
| mAb-58 | Ab | SARS-CoV1, | 229E, HKU1, | | | S; Unk | B-cells; SARS-CoV1 | 925 | QVQLVQSGGNVVQPGGSLRLSCVGSEF |
| | | SARS-CoV2 | NL63, OC43 | | | | Human Patient | | SITFFAMQWVRRTPGKGLEWVALVSHD |
| | | | | | | | | | GSNIRYSDSVKGRFIISRDNAKNTLYLQL |
| | | | | | | | | | DSLTPEDTGIYYCARDHALQNGRPGYFD |
| | | | | | | | | | SWGQGSQVTVSS |
| mAb-59 | Ab | SARS-CoV1, | 229E, HKU1, | | | S; Unk | B-cells; SARS-CoV1 | 926 | QVQLVQSGGGLVQPGGSLRLSCSASGF |
| | | SARS-CoV2 | NL63, OC43 | | | | Human Patient | | TFNTYAMHWVRQAPGKRLEYVSSITRD |
| | | | | | | | | | GAGKFYADSVKGRFTISRDNSKNTLYQQ |
| | | | | | | | | | MSSLRPEDTAVYYCVREGQQWLGLYFD |
| | | | | | | | | | HWGQGALVTVSS |
| mAb-6 | Ab | SARS-CoV1, | 229E, HKU1, | | | S; Unk | B-cells; SARS-CoV1 | 927 | QVQLVQSGAEVKKPGASVKVSCRASGY |
| | | SARS-CoV2 | NL63, OC43 | | | | Human Patient | | TFSGYDINWVRQATGQGLEWMGWM |
| | | | | | | | | | NPNSGDTGYAHKFQGRVTMTRNSSIST |
| | | | | | | | | | AYMELSSLTSEDTAVYFCAREKKSFGPQY |
| | | | | | | | | | YYGSGEDWGQGTLVTVSS |
| mAb-60 | Ab | SARS-CoV1, | 229E, HKU1, | | | S; Unk | B-cells; SARS-CoV1 | 928 | EVQLVQSGAEMKKPGESLKISCKGSGYS |
| | | SARS-CoV2 | NL63, OC43 | | | | Human Patient | | FPNYWIGWVRQMPGKGLEWMAIMW |
| | | | | | | | | | PSDSDTRYSPSFQGQVTISADTSTSTVYL |
| | | | | | | | | | QWGSLKASDTAMYYCVRQRYCSGGSCF |
| | | | | | | | | | LFEDAFEIWGQGTMVTVSS |
| mAb-61 | Ab | SARS-CoV2 | 229E, HKU1, | | | S; Unk | B-cells; SARS-CoV1 | 929 | EVQLVESGGGLVQPGGSLRLSCAASGFI |
| | | | NL63, OC43, | | | | Human Patient | | FKNEPMNWIRQFPGKGLEWISNIRDNG |
| | | | SARS-CoV1 | | | | | | NDVYYADSVKGRFTVSRDNAKNSLYLQ |
| | | | | | | | | | MNSLRDDDTALYYCVRDTDWAFDSWG |
| | | | | | | | | | QGTLVTVSS |
| mAb-62 | Ab | SARS-CoV2 | 229E, HKU1, | | | S; Unk | B-cells; SARS-CoV1 | 930 | EVQLVESGPTLVKPTQTLTLTCTFSGFSLT |
| | | | NL63, OC43, | | | | Human Patient | | TRRQGVGWLRRPPGKALEWLALIYWD |
| | | | SARS-CoV1 | | | | | | DDKRYSPSLKSRLTITKDTSKNHVVLSLT |
| | | | | | | | | | NVGPADTATYYCAHTSELPPRRPYAAFD |
| | | | | | | | | | FWGQGTLVTVSS |
| mAb-63 | Ab | SARS-CoV2 | 229E, HKU1, | | | S; Unk | B-cells; SARS-CoV1 | 931 | EVQLLESGGGLVQPGGSLRLSCAASGFP |
| | | | NL63, OC43, | | | | Human Patient | | FSTDAMNWVRQAPGEGLEWVSTISDS |
| | | | SARS-CoV1 | | | | | | GRDTYYAASVRGRFTISRDNSKNTVYLQ |
| | | | | | | | | | MNSLRVEDTAVYYCANTNFLDYWGQG |
| | | | | | | | | | TLVTVSS |
| mAb-64 | Ab | SARS-CoV1, | 229E, HKU1, | | | S; Unk | B-cells; SARS-CoV1 | 932 | EVQLQESGPGLLKPSETLSLTCTVSGSPIA |
| | | SARS-CoV2 | NL63, OC43 | | | | Human Patient | | SNYWSWVRQPAGKGLEWIGRIDTSPTT |
| | | | | | | | | | DYNPSLKSRVIMSVDTSTSQFSLKMSSVT |
| | | | | | | | | | AADTAVYYCTRSFISFDSSGHPYYYYAMD |
| | | | | | | | | | VWGQGTTVTVSS |
| mAb-65 | Ab | SARS-CoV1, | 229E, HKU1, | | | S; Unk | B-cells; SARS-CoV1 | 933 | QVQLVQSGAEVRKPGSSVKLSCRASGG |
| | | SARS-CoV2 | NL63, OC43 | | | | Human Patient | | TFHTYTVNWVRQAPGQGLEWLGGIIPIF |
| | | | | | | | | | GTPTYAQRFQGKVSITADSSTNTVFMEL |
| | | | | | | | | | TSLTSEDTAVYYCTRETGTDEFDFWGQG |
| | | | | | | | | | ALVTVSS |
| mAb-66 | Ab | SARS-CoV2 | 229E, HKU1, | | | S; Unk | B-cells; SARS-CoV1 | 934 | EVQLVESGPGLVKPSGTLSLTCAVSGAS |
| | | | NL63, OC43, | | | | Human Patient | | VSSDHWWSWVRQSPGKGLEWIGEVY |
| | | | SARS-CoV1 | | | | | | HSGSTNYNPSLKSRVTISLDQSNNQFSLK |
| | | | | | | | | | LTSVTAADTAIYYCATMWGGLCTASNCY |
| | | | | | | | | | GNPMDVWGQGTTVTVSS |
| mAb-67 | Ab | SARS-CoV2 | 229E, HKU1, | | | S; Unk | B-cells; SARS-CoV1 | 935 | EVQLVESGPGLVKPSGTLSLTCAVTGAS |
| | | | NL63, OC43, | | | | Human Patient | | VSSDHWWSWVRQSPGKGLEWIGEVY |
| | | | SARS-CoV1 | | | | | | HSGSTNYNPSLKSRVTISLDQSNNQFSLK |
| | | | | | | | | | LTSVTAADTAIYYCATMWGGLCTASNCY |
| | | | | | | | | | GNPMDVWGQGTTVTVSS |
| mAb-68 | Ab | SARS-CoV1, | 229E, HKU1, | | | S; Unk | B-cells; SARS-CoV1 | 936 | QVQLQESGPGLVKPSGTLSLTCAVSGAS |
| | | SARS-CoV2 | NL63, OC43 | | | | Human Patient | | VSSDHWWSWVRQSPGKGLEWIGEVY |
| | | | | | | | | | HSGSTNYNPSLKSRVTISLDQSNNQFSLK |
| | | | | | | | | | LTSVTAADTAIYYCATMWGGLCTASNCY |
| | | | | | | | | | GNPMDVWGQGTTVTVSS |
| mAb-69 | Ab | SARS-CoV1, | 229E, HKU1, | | | S; Unk | B-cells; SARS-CoV1 | 937 | QVQLQESGGGLVQPGGSLRLSCEASGF |
| | | SARS-CoV2 | NL63, OC43 | | | | Human Patient | | SFSDFVMHWVRQVPGKGLEWVSRISH |
| | | | | | | | | | DGSITSYVDSVKGRFTVSRDNGKKTLYL |
| | | | | | | | | | QMNSPRTEDTAVYYCARDLAWTFFDY |
| | | | | | | | | | WGHGTLVTVSS |
| mAb-7 | Ab | SARS-CoV1, | 229E, HKU1, | | | S; Unk | B-cells; SARS-CoV1 | 938 | EVQLLESGGGLSRPGGSLRLSCAASGFIA |
| | | SARS-CoV2 | NL63, OC43 | | | | Human Patient | | SRNCMQWVRQAPGKGLEWVSIICGDEI |
| | | | | | | | | | TYIRDSVKGRFTISRDDSKNTLHLEMNSL |
| | | | | | | | | | RADDTAVYYCARATPPGGTTGWPYIDL |
| | | | | | | | | | WGQGTLVTVSS |
| mAb-70 | Ab | 229E, HKU1 | OC43 | | | S; Unk | B-cells; SARS-CoV1 | 939 | EVQLLESGGGLVQPGGSLRLSCAASGFP |
| | | (weak), | | | | | Human Patient | | FSTDAMNWVRQAPGEGLEWVSTISDT |
| | | NL63, SARS- | | | | | | | GRDTYYAASVKGRFTISRDNSKNTVYLQ |
| | | CoV1 | | | | | | | MNSLRAEDTAVYYCANTNFLDYWGQG |
| | | (weak), | | | | | | | TLVTVSS |
| | | SARS-CoV2 | | | | | | | |
| mAb-71 | Ab | SARS-CoV2 | 229E, HKU1, | | | S; Unk | B-cells; SARS-CoV1 | 940 | EVQLVESGGGLVQPGRSLRLSCAASGFIL |
| | | | NL63, OC43, | | | | Human Patient | | DDYAVHWVRLAPGKGLEWVSGITWNS |
| | | | SARS-CoV1 | | | | | | GYLGYADSVKGRFTISRDNAKNSLYLQM |
| | | | | | | | | | NSLRPEDTALYYCAKLGTDHPIGVDVW |
| | | | | | | | | | GQGTTVTVSS |
| mAb-72 | Ab | SARS-CoV2 | 229E, HKU1, | | | S; Unk | B-cells; SARS-CoV1 | 941 | QVQLVQSGGGLVQPGGSLRLSCSASGF |
| | | | NL63, OC43, | | | | Human Patient | | TFNTYTMHWVRQAPGKGLEYVSAISSN |
| | | | SARS-CoV1 | | | | | | GVVTYYADSVKGRFTISRDNSKNTLYLQ |
| | | | | | | | | | MSSLRAEDTAVYYCVKALYSSSWCPFDY |
| | | | | | | | | | WGQGALVTVSS |
| mAb-73 | Ab | SARS-CoV2 | 229E, HKU1, | | | S; Unk | B-cells; SARS-CoV1 | 942 | QVQLQQSGGGLVQPGGSLRLSCEASGF |
| | | | NL63, OC43, | | | | Human Patient | | NFNSYSMSWVRQAPGKGLEWLSYISSR |
| | | | SARS-CoV1 | | | | | | SSTIKYASSVQGRFTVSRDNAKKSVFLQ |
| | | | | | | | | | MNSLRDEDTAVYYCARELDSETYYNYNS |
| | | | | | | | | | LDVWGQGTTVTVSS |
| mAb-74 | Ab | SARS-CoV2 | 229E, HKU1, | | | S; Unk | B-cells; SARS-CoV1 | 943 | QVQLQESGPGLVRPSETLSLTCTVSRGSI |
| | | | NL63, OC43, | | | | Human Patient | | SSSYWSWIRQPPGKGLEWIGFMYYSGS |
| | | | SARS-CoV1 | | | | | | TNYNPSLKSRVTISLDTSKNQFSLKLSSVT |
| | | | | | | | | | AADTAVYYCAKAQGIYYRGWSYWFDP |
| | | | | | | | | | WGQGTLVTVSS |
| mAb-75 | Ab | 229E, HKU1 | OC43 | | | S; Unk | B-cells; SARS-CoV1 | 944 | EVQLVQSGAEVKKPGASVKISCKASGYA |
| | | (weak), | | | | | Human Patient | | FRNNYINWIRQAPGQGLEWMGIINPSA |
| | | NL63, SARS- | | | | | | | GTSTYAQKFQGRVTMTRDTSTNTVYME |
| | | CoV1 | | | | | | | ITSLRSEDTATYFCAREARRQVTQWFGE |
| | | (weak), | | | | | | | FWGPYNWFDPWGQGTLVTVSS |
| | | SARS-CoV2 | | | | | | | |
| mAb-76 | Ab | SARS-CoV1, | 229E, HKU1, | | | S; Unk | B-cells; SARS-CoV1 | 945 | QVQLQQWGAGLLKPSETLSLTCGVYGV |
| | | SARS-CoV2 | NL63, OC43 | | | | Human Patient | | SFSDYYWSWIRQPPGKGLEWIGEINHS |
| | | | | | | | | | GITNYNPSLKSRVTISVDTSKNQFSLKLSS |
| | | | | | | | | | VTAADTAVYYCARGLISYTLWLRESYFDY |
| | | | | | | | | | WGQGTLVTVSS |
| mAb-77 | Ab | SARS-CoV1, | 229E, HKU1, | | | S; Unk | B-cells; SARS-CoV1 | 946 | QVQLVQSGAEVKKPGSSVKVSCKASGG |
| | | SARS-CoV2 | NL63, OC43 | | | | Human Patient | | SLRDYAISWVRQAPGQGPEWMGGIMP |
| | | | | | | | | | IFGTAGYAQKFQGRVKFTADESATTAYM |
| | | | | | | | | | ELTGLRSEDSAVYFCARDPSILNTGNHH |
| | | | | | | | | | WYDLDIWGQGTTVTVSS |
| mAb-78 | Ab | SARS-CoV2 | 229E, HKU1, | | | S; Unk | B-cells; SARS-CoV1 | 947 | QVQLVQSGAEVKKPGASVKVSCKASGY |
| | | | NL63, OC43, | | | | Human Patient | | TFTNDGFVWVRQAPGQVPEWMGWIS |
| | | | SARS-CoV1 | | | | | | VHTGDTIYAQRFQGRVTMTTDTSTRTSY |
| | | | | | | | | | MELMSLRSDDTAVYYCARDYGDGPPD |
| | | | | | | | | | HWGQGTLVTVSS |
| mAb-79 | Ab | SARS-CoV1, | 229E, HKU1, | | | S; Unk | B-cells; SARS-CoV1 | 948 | QVQLVQSGPEVKKPGSSVRVSCKVSGG |
| | | SARS-CoV2 | NL63, OC43 | | | | Human Patient | | PFSSYGVSWARQAPEKGLEWMGGVLPI |
| | | | | | | | | | FGTVGYVHKFQGRVTITADESTSTVYMA |
| | | | | | | | | | LSSLRSEDTAVYYCVLDTTMSHPHNWY |
| | | | | | | | | | GMDVWGHGTTVTVSS |
| mAb-8 | Ab | SARS-CoV1, | 229E, HKU1, | | | S; Unk | B-cells; SARS-CoV1 | 949 | QVQLVQSGAEVKKPGSSMKLSCKASGI |
| | | SARS-CoV2 | NL63, OC43 | | | | Human Patient | | NFRSYSFSWVRQAPGQGLEWMGGVIP |
| | | | | | | | | | YFPTANYAEKFRGRVTATADESTGTVYLE |
| | | | | | | | | | MSSLRSEDTAVYYCASEYFDGRSYHSFC |
| | | | | | | | | | GLDVWGQGTLVTVSS |
| mAb-80 | Ab | 229E, HKU1 | OC43 | | | S; Unk | B-cells; SARS-CoV1 | 950 | QVQLVQSGAEVKKPGSSVKVSCKASGG |
| | | (weak), | | | | | Human Patient | | TLSDYAISWVRQAPGQGLEWMGGIMP |
| | | NL63, SARS- | | | | | | | VFGSPGYAEIFQGRLTITADESRSTAYME |
| | | CoV1 | | | | | | | LTSLRSEDTAVYYCARDPSILNTGPHHW |
| | | (weak), | | | | | | | YDLDIWGPGTTVTVSS |
| | | SARS-CoV2 | | | | | | | |
| mAb-81 | Ab | SARS-CoV2 | 229E, HKU1, | | | S; Unk | B-cells; SARS-CoV1 | 951 | EVQLVQSGAEVKKPGSSMRVSCRVSGG |
| | | | NL63, OC43, | | | | Human Patient | | TFITHAMSWVRQAPGQGPEWMGGIV |
| | | | SARS-CoV1 | | | | | | PLFGRASYAQPSQTRVQITADESTSTVYL |
| | | | | | | | | | EVPSLTSEDTAVYYCVRDSEPYTATRSQN |
| | | | | | | | | | HYWYDMDVWGQGTTVTVSS |
| mAb-82 | Ab | HKU1, SARS- | 229E, NL63, | | | S; Unk | B-cells; SARS-CoV1 | 952 | EVQLVESGPGLVKPSATLSLTCTVSGGSI |
| | | CoV1, SARS- | OC43 | | | | Human Patient | | NNYYWTWVRQSAGKGLEWIGRINTSG |
| | | CoV2 | | | | | | | STNYNASLKSRVTMSIDTSKNEFSLRLSS |
| | | | | | | | | | VTAADTAVYYCAREFGVRFLDRSLFGAM |
| | | | | | | | | | DVWGHGATVTVSS |
| mAb-83 | Ab | SARS-CoV2 | 229E, HKU1, | | | S; Unk | B-cells; SARS-CoV1 | 953 | QVQLVESGGGVVQPGRSLRLSCAASGF |
| | | | NL63, OC43, | | | | Human Patient | | TFSAFAMHWVRQAPGKGLEWVTIISYD |
| | | | SARS-CoV1 | | | | | | GSNEYYADSVQGRFSISRDNSKNTLFLQ |
| | | | | | | | | | MSSLRTEDTAIYYCARAGGYLSAFDIWG |
| | | | | | | | | | QGTTVTVSS |
| mAb-84 | Ab | SARS-CoV1, | 229E, HKU1, | | | S; Unk | B-cells; SARS-CoV1 | 954 | EVQLVQSGAEVKKPGSSVKVSCKVSGGT |
| | | SARS-CoV2 | NL63, OC43 | | | | Human Patient | | FSNYAISWLRQAPGQGPEWMGGIIPAL |
| | | | | | | | | | SKVGYAGKFQARLTFSADELKTTVYMDL |
| | | | | | | | | | SSLTSEDTAVYYCARDPSFLNAGNHFYYD |
| | | | | | | | | | FDVWGQGTMVTVSS |
| mAb-85 | Ab | SARS-CoV2 | 229E, HKU1, | | | S; Unk | B-cells; SARS-CoV1 | 955 | QVQLQESGPGLVKPSGTLSLTCAVSGGS |
| | | | NL63, OC43, | | | | Human Patient | | ITSRDWWSWVRQPPGKGLEWIGEVYH |
| | | | SARS-CoV1 | | | | | | SGSTSYNPSLKSRVTISVDKSKNEFSLKLS |
| | | | | | | | | | SVTAADTAVYYCARAGNIVVMPAAQYY |
| | | | | | | | | | FDYWGQGTLVTVSS |
| mAb-86 | Ab | SARS-CoV1, | 229E, HKU1, | | | S; Unk | B-cells; SARS-CoV1 | 956 | EVQLVESGGSVVQPGTSLKLSCAGSAGL |
| | | SARS-CoV2 | NL63, OC43 | | | | Human Patient | | TITRYAMHWVRQAPGKGLEWVALVSH |
| | | | | | | | | | DGIHIGYSDSVRGRFTISRDNSRNTLYLQ |
| | | | | | | | | | MDGLRPEDTAVYYCVRDDVLQHSRPSG |
| | | | | | | | | | PGYFVSWGQGTLVTVSS |
| mAb-87 | Ab | SARS-CoV2 | 229E, HKU1, | | | S; Unk | B-cells; SARS-CoV1 | 957 | QVQLQESGPGLVKPSETLSLTCTVSGGS |
| | | | NL63, OC43, | | | | Human Patient | | MNHYYWSWIRQPPGKGLEGIGYTYYSG |
| | | | SARS-CoV1 | | | | | | STNYNPSLKSRVTISVDASKNQFSLRLSSV |
| | | | | | | | | | TAADTAVYYCARGSQIDLRGGLGATFFD |
| | | | | | | | | | YWGQGTLVTVSS |
| mAb-88 | Ab | SARS-CoV2 | 229E, HKU1, | | | S; Unk | B-cells; SARS-CoV1 | 958 | QVQLVESGAEVKKPGSSVKISCKISGDTF |
| | | | NL63, OC43, | | | | Human Patient | | STNAISWLRQAPGREPEWMGGIVPLVG |
| | | | SARS-CoV1 | | | | | | PASYAQRPQGRLTITADEFTNTAYLELNS |
| | | | | | | | | | LRSEDTATYYCARDSDPYTATRRHNHYW |
| | | | | | | | | | YAMDVWGQGTTVTVSS |
| mAb-89 | Ab | SARS-CoV1, | 229E, HKU1, | | | S; Unk | B-cells; SARS-CoV1 | 959 | EVQLLESGGGLVQPGGSLRLSCAASGFIF |
| | | SARS-CoV2 | NL63, OC43 | | | | Human Patient | | KNEPMNWIRQFPGKGLEWISNIRDNG |
| | | | | | | | | | NDVYYADSVKGRFTVSRDNAKNSLYLQ |
| | | | | | | | | | MNSLRDDDTALYYCVRDTDWAFDSWG |
| | | | | | | | | | QGTLVTVSS |
| mAb-9 | Ab | SARS-CoV1, | 229E, HKU1, | | | S; Unk | B-cells; SARS-CoV1 | 960 | QVQLVQSGAEVKKPGASVKVSCKASGY |
| | | SARS-CoV2 | NL63, OC43 | | | | Human Patient | | TFSSYDINWVRQATGQGLEWMGWMS |
| | | | | | | | | | PNTGDTGYAHKFQGRVRMTSNTSISTA |
| | | | | | | | | | YMELNSLTSEDTAVYYCARRGNNFGYYY |
| | | | | | | | | | YYTVDVWGQGTTVTVSS |
| mAb-90 | Ab | HKU1, SARS- | 229E, NL63, | | | S; Unk | B-cells; SARS-CoV1 | 961 | QVQLVQSGADVKKPGASVKVSCKASGY |
| | | CoV1, SARS- | OC43 | | | | Human Patient | | TFTSYYMHWVRQAPGQGLEWLGVIHP |
| | | CoV2 | | | | | | | SGGSTTFAQKFQGRVTMTRDTSTSTVY |
| | | | | | | | | | MELSSLRSEDTAVYYCARVLAGSSHEW |
| | | | | | | | | | QLTHDAFDIWGQGTTVTVSS |
| mAb-91 | Ab | HKU1 | 229E, NL63, | | | S; Unk | B-cells; SARS-CoV1 | 962 | EVQLLESGGGLVQPGGSLRLSCAASGFT |
| | | (weak), | OC43 | | | | Human Patient | | FSSYAMSWVRQAPGKGLEWVSGIDGG |
| | | SARS-CoV1 | | | | | | | GGSSYYADSVRGRFTVSRDNSKNMLHL |
| | | (weak), | | | | | | | QMNSLRADDTAVYFCAKGDWIRYFDW |
| | | SARS-CoV2 | | | | | | | SLPISFFDYWGQGALVTVSS |
| mAb-92 | Ab | SARS-CoV1, | 229E, HKU1, | | | S; Unk | B-cells; SARS-CoV1 | 963 | EVQLLESGPGLLKPSETLSLTCTVSGDSV |
| | | SARS-CoV2 | NL63, OC43 | | | | Human Patient | | SSGNFYWSWVRRPPGKALEWIAYSHYT |
| | | | | | | | | | GGTNSDPSFMGRVTMSIDPSRNQFSLR |
| | | | | | | | | | LTSVAAADTAVYYCARTTSPLTYSGHWP |
| | | | | | | | | | LFDYWGQGSLVTVSS |
| mAb-93 | Ab | SARS-CoV1, | 229E, HKU1, | | | S; Unk | B-cells; SARS-CoV1 | 964 | QVQLVQSGDEMKKPGSSVKVSCKASGD |
| | | SARS-CoV2 | NL63, OC43 | | | | Human Patient | | TFSTHAISWVRQAPGQGPEWMGGIIPL |
| | | | | | | | | | FGTASYAQTSQSRVKITADESTSTAYMEL |
| | | | | | | | | | SSLTSEDTAVYYCVRDSDPYTATSRNNHY |
| | | | | | | | | | WYGMDVWGQGTTVTVSS |
| mAb-94 | Ab | SARS-CoV2 | 229E, HKU1, | | | S; Unk | B-cells; SARS-CoV1 | 965 | QVQLVQSGAEVKKPGSSVKVSCKASGG |
| | | | NL63, OC43, | | | | Human Patient | | MFTDYAISWVRQAPGQRLEWMGGIM |
| | | | SARS-CoV1 | | | | | | PGLGSPAYAQIFRDRATISADVSTSTAYL |
| | | | | | | | | | ELTSLKPEDTAVYYCARDPSILNTGNHH |
| | | | | | | | | | WYDLDIWGQGTTVTVSS |
| mAb-95 | Ab | SARS-CoV1, | 229E, HKU1, | | | S; Unk | B-cells; SARS-CoV1 | 966 | QVQLVQSGAEVKKPGSSVKVSCKASGG |
| | | SARS-CoV2 | NL63, OC43 | | | | Human Patient | | MFTDYAISWVRQAPGQRPEWMGGIM |
| | | | | | | | | | PGLGSPAYAQIFRGRATISADLSTSTAYLE |
| | | | | | | | | | LTSLKPEDTAVYYCARDPSILNTGNHHW |
| | | | | | | | | | YDLDIWGQGTMVTVSS |
| mAb-96 | Ab | SARS-CoV2 | 229E, HKU1, | | | S; Unk | B-cells; SARS-CoV1 | 967 | QVTLKESGGGLVQPGGSLRLSCAASGFT |
| | | | NL63, OC43, | | | | Human Patient | | VNSYGMSWVRQAPGKGLEWVSGFKSR |
| | | | SARS-CoV1 | | | | | | SDRPDYAESVKGRFTISRDTSKNTVYLE |
| | | | | | | | | | MIGLRAEDTATYYCVRMDWMEWMKY |
| | | | | | | | | | YFDSWGQGALVTVSS |
| mAb-97 | Ab | SARS-CoV1 | 229E, HKU1, | | | S; Unk | B-cells; SARS-CoV1 | 968 | QVQLVQSGAEVKKPGSSVKVSCKASGG |
| | | (weak), | NL63, OC43 | | | | Human Patient | | MISDYAISWVRQAPGQRLEWMGGIMP |
| | | SARS-CoV2 | | | | | | | AFGSPGYAQIFRGRATISADVSTNTAYLE |
| | | | | | | | | | LTSLNPDDTAVYYCARDPSILNTGNHHW |
| | | | | | | | | | YDLDMWGQGTMVTVSS |
| mAb-98 | Ab | SARS-CoV1, | 229E, HKU1, | | | S; Unk | B-cells; SARS-CoV1 | 969 | QVQLVESGGSVVQPGTSLKLSCAGSAGL |
| | | SARS-CoV2 | NL63, OC43 | | | | Human Patient | | TITRYAMHWVRQAPGKGLEWVALVSH |
| | | (weak) | | | | | | | DGIHIGYSDSVRGRFTISRDNSRNTLYLQ |
| | | | | | | | | | MDGLRPEDTAVYYCVRDDVLQHSRPSG |
| | | | | | | | | | PGYFVSWGQGTLVTVSS |
| mAb-99 | Ab | SARS-CoV2 | 229E, HKU1, | | | S; Unk | B-cells; SARS-CoV1 | 970 | QVQLQESGPGLVKPSGTLSLTCAVSGAS |
| | | (weak) | NL63, OC43, | | | | Human Patient | | VSSDHWWSWVRQSPGKGLEWIGEVY |
| | | | SARS-CoV1 | | | | | | HSGSTNYNPSLKSRVTISLDQSNNQFSLK |
| | | | | | | | | | LTSVTAADTAIYYCATMWGGLCTASNCY |
| | | | | | | | | | GNPMDVWGQGTTVTVSS |
| mBG17 | Ab | SARS-CoV1, | 229E | | | N | Immunised Mouse | 971 | EVKLEESGGGLVQPGGSMKFSCVASGF |
| | | SARS-CoV2, | | | | | | | TFSDYWMNWVRQSPDKGLEWVAEIRL |
| | | NL63 | | | | | | | KSNNYATHYAASVKGRFTISRDDSKSSVY |
| | | (weak) | | | | | | | LQMNNLRAEDSGIYYCTRSAMDYWGQ |
| | | | | | | | | | GTSVTVSS |
| mBG21 | Ab | SARS-CoV1, | 229E | | | N | Immunised Mouse | 972 | QIQLVQSGPELKKPGETVKISCKASGYTF |
| | | SARS-CoV2, | | | | | | | TDYSMHWVKQAPGKGSKWMGWINTE |
| | | NL63 | | | | | | | TGEPTYADDFKGRFAFSLETSASTAYLQI |
| | | (weak) | | | | | | | NNLKNEDTATYFCALRRWGQGTLVTVS |
| | | | | | | | | | S |
| mBG22 | Ab | SARS-CoV1, | 229E | | | N | Immunised Mouse | 973 | QIQLVQSGPELKKPGETVKISCKASGYTF |
| | | SARS-CoV2, | | | | | | | TDYSMHWVKQAPGKGSKWMGWINTE |
| | | NL63 | | | | | | | TGEPTYADDFKGRFAFSLETSASTAYLQI |
| | | (weak) | | | | | | | NNLKNEDTATYFCALRRWGQGTLVTVS |
| | | | | | | | | | A |
| mBG57 | Ab | SARS-CoV1, | 229E | | | N | Immunised Mouse | 974 | QIQLVQSGPELKKPGETVKISCKASGYTF |
| | | SARS-CoV2, | | | | | | | TDYSMHWVKQAPGKGSKWMGWINTE |
| | | NL63 | | | | | | | TGEPTYADDFKGRFAFSLETSASTAYLQI |
| | | (weak) | | | | | | | NNLKNEDTATYFCALRRWGQGTLVTVS |
| | | | | | | | | | A |
| mBG67 | Ab | SARS-CoV1, | 229E | | | N | Immunised Mouse | 975 | EVQLVESGGGLVQPGGSLKLSCAASGFT |
| | | SARS-CoV2, | | | | | | | FSNYGMSWVRQTPDKRLELVATINRNG |
| | | NL63 | | | | | | | GSTYYLDSVKVRFTISRDNAKSTLFLQLSS |
| | | (weak) | | | | | | | LKSDDTAMYYCARIYDFDEDYFDVWGA |
| | | | | | | | | | GTTVTVSS |
| MD17 | Ab | SARS-CoV2 | | SARS-CoV2 | | S; RBD | Phage Display | | ND |
| | | | | (weak) | | | Library (Antibody, | | |
| | | | | | | | human, immune - | | |
| | | | | | | | CoV2) | | |
| MD29 | Ab | SARS-CoV2 | | SARS-CoV2 | | S; RBD | Phage Display | | ND |
| | | | | (weak) | | | Library (Antibody, | | |
| | | | | | | | human, immune - | | |
| | | | | | | | CoV2) | | |
| MD45 | Ab | SARS-CoV2 | | SARS-CoV2 | | S; RBD | Phage Display | | ND |
| | | | | | | | Library (Antibody, | | |
| | | | | | | | human, immune - | | |
| | | | | | | | CoV2) | | |
| MD47 | Ab | SARS-CoV2 | | SARS-CoV2 | | S; RBD | Phage Display | | ND |
| | | | | (weak) | | | Library (Antibody, | | |
| | | | | | | | human, immune - | | |
| | | | | | | | CoV2) | | |
| MD62 | Ab | SARS-CoV2 | | SARS-CoV2 | | S; RBD | Phage Display | | ND |
| | | | | | | | Library (Antibody, | | |
| | | | | | | | human, immune - | | |
| | | | | | | | CoV2) | | |
| MD63 | Ab | SARS-CoV2 | | | SARS-CoV2 | S; RBD | Phage Display | | ND |
| | | | | | | | Library (Antibody, | | |
| | | | | | | | human, immune - | | |
| | | | | | | | CoV2) | | |
| MD65 | Ab | SARS-CoV2 | | SARS-CoV2 | | S; RBD | Phage Display | | ND |
| | | | | | | | Library (Antibody, | | |
| | | | | | | | human, immune - | | |
| | | | | | | | CoV2) | | |
| MD67 | Ab | SARS-CoV2 | | SARS-CoV2 | | S; RBD | Phage Display | | ND |
| | | | | | | | Library (Antibody, | | |
| | | | | | | | human, immune - | | |
| | | | | | | | CoV2) | | |
| mNb6 | Nb | SARS-CoV2 | | SARS-CoV2 | | S; RBD | Yeast Display | | ND |
| | | | | | | | Library (scFv, | | |
| | | | | | | | human) | | |
| mNb6-tri | Nb | SARS-CoV2 | | SARS-CoV2 | | S; RBD | Yeast Display | | ND |
| | | | | | | | Library (scFv, | | |
| | | | | | | | human) | | |
| MnCit3p1_ | Ab | SARS-CoV2 | | SARS-CoV2 | | S; RBD | B-cells; SARS-CoV2 | 976 | EVQLLESGGGLVQPGGSLRLSCAASGFT |
| G9 | | | | | | | Human Patient | | FRNYAMTWVRQAPGKGLEWVSGISDS |
| | | | | | | | | | GDRTYNADSVKGRFSISRDNSKNTLHLQ |
| | | | | | | | | | MNSLRAEDTAVYYCALASGSYFGGANY |
| | | | | | | | | | WGQGTLVTVSS |
| MnC2t1p1_ | Ab | SARS-CoV2 | | SARS-CoV2 | | S; RBD | B-cells; SARS-CoV2 | 977 | EVQLVESGGGLVQPGGSLRLSCAASGFT |
| A3 | | | | | | | Human Patient | | VSSNYMSWVRQAPGRGLEWVSVIYSG |
| | | | | | | | | | GSTFYADSVKGRFTISRDNSKNTLYLQM |
| | | | | | | | | | NSLRPEDTAVYYCATGARFGESPFDYW |
| | | | | | | | | | GQGTLVTVSS |
| MnC2t1p1_ | Ab | SARS-CoV2 | | SARS-CoV2 | | S; RBD | B-cells; SARS-CoV2 | 978 | EVQLVESGGGLVQPGGSLRLSCAASGFT |
| C5 | | | | | | | Human Patient | | VSSNYMSWVRQAPGKGLEWVSVIYSG |
| | | | | | | | | | GSTYYADSVKGRFTISRDNSKNTLYLQM |
| | | | | | | | | | NSLRAEDTAVYYCATGARFGESPFDYW |
| | | | | | | | | | GQGTLVTVSS |
| MnC2t2p1_ | Ab | SARS-CoV2 | | SARS-CoV2 | | S; RBD | B-cells; SARS-COV2 | 979 | QVQLVQSGAEVKKPGSSVKVSCKASGG |
| C11 | | | | | | | Human Patient | | TFSRYTIIWVRQAPGQGLEWMGRIIPIL |
| | | | | | | | | | DIANYAQKFQGRVTITADKSTSTAYMEL |
| | | | | | | | | | SSLRSEDTAVYYCAREGGLDYFGSRNSG |
| | | | | | | | | | WTYTWFDPWGQGTLVTVSS |
| MnC4t1p1_ | Ab | SARS-CoV2 | | SARS-CoV2 | | S; RBD | B-cells; SARS-CoV2 | 980 | QLQVQESGPGLVKPSETLSLTCTVSGASI |
| A10 | | | | | | | Human Patient | | SSNHYFWGWIRQPPGKGLAWIGSMHY |
| | | | | | | | | | SGSTYYNPSLKSRVTISVDTSKNQLSLKLS |
| | | | | | | | | | SVTAADTAVYYCARGVNYYDRNGYYRN |
| | | | | | | | | | DGFDIRGQGTMVTVSS |
| MnC4t1p1_ | Ab | SARS-CoV2 | | SARS-CoV2 | | S; RBD | B-cells; SARS-CoV2 | 981 | EVQLVESGGGLVQPGGSLRLSCAASGFT |
| A11 | | | | | | | Human Patient | | FSSYSMNWVRQAPGKGLEWVSYISSSS |
| | | | | | | | | | NTRYYTDSVMGRFTISRDNAKNSLFLQ |
| | | | | | | | | | MNSLRAEDTAVYYCASSKGFCSGGSCSD |
| | | | | | | | | | YWGQGTLVTVSS |
| MnC4t2p1_ | Ab | SARS-CoV2 | | SARS-CoV2 | | S; RBD | B-cells; SARS-CoV2 | 982 | EVQLVESGGHLVQPGRSLRLSCAASGFT |
| B3 | | | | | | | Human Patient | | FDDYAMHWVRQVPGKGLEWVSGISW |
| | | | | | | | | | NGGILDYADSVKGRFTISRDNAKNSLYL |
| | | | | | | | | | HMRSLRTDDTALYYCAKDLRRQDYYAD |
| | | | | | | | | | WYFDLWGRGTLVTVSS |
| MnC4t2p1_ | Ab | SARS-CoV2 | | SARS-CoV2 | | S; RBD | B-cells; SARS-CoV2 | 983 | QLQVQESGPGLVKPSETLSLTCTVSGASI |
| D10 | | | | | | | Human Patient | | SSNHYFWGWIRQPPGKGLAWIGSMHY |
| | | | | | | | | | SGSTYYNPSLKSRVTISVDTSKNQLSLKLS |
| | | | | | | | | | SVTAADTAVYYCARGVNYYDRNGYYRN |
| | | | | | | | | | DGFDIRGQGTMVTVSS |
| MnC4t2p1_ | Ab | SARS-CoV2 | | SARS-CoV2 | | S; RBD | B-cells; SARS-CoV2 | 984 | EVQLVESGGHLVQPGRSLRLSCAASGFT |
| E6 | | | | | | | Human Patient | | FDDYAMHWVRQVPGKGLEWVSGISW |
| | | | | | | | | | NGGILGYADSVKGRFTISRDNAKNSLYL |
| | | | | | | | | | QMRSLRTDDTALYYCAKDLRRQDYYAD |
| | | | | | | | | | WYFDLWGRGTLVTVSS |
| MnC4t2p1_ | Ab | SARS-CoV2 | | SARS-CoV2 | | S; RBD | B-cells; SARS-CoV2 | 985 | QLQVQESGPGLVKPSETLSLTCTVSGASI |
| F5 | | | | | | | Human Patient | | SSNHYFWGWIRQPPGKGLAWIGSMHY |
| | | | | | | | | | SGSTYYNPSLKSRVTISVDTSKNQLSLKLS |
| | | | | | | | | | SVTAADTAVYYCARGVNYYDRNGYYRN |
| | | | | | | | | | DGFDIRGQGTMVTVSS |
| MnC4t2p2_ | Ab | SARS-CoV2 | | SARS-CoV2 | | S; RBD | B-cells; SARS-CoV2 | 986 | QVQLVQSGSELKKPGASVKISCKASGYIF |
| A4 | | | | | | | Human Patient | | INYAMNWVRQAPGQGLEWMGWINT |
| | | | | | | | | | NTGNPTYAQDFTGRFVFSLDTSLSTAYL |
| | | | | | | | | | QISSLEAEDTAVYYCAKIGSRNSLGVWG |
| | | | | | | | | | QGTLVTVSA |
| MnC5t2p1_ | Ab | SARS-CoV2 | | SARS-CoV2 | | S; RBD | B-cells; SARS-CoV2 | 987 | QMQLVQSGPEVKKPGTSVKVSCKASGF |
| G1 | | | | | | | Human Patient | | TFTSSAVQWVRQARGQRLEWIGWIVV |
| | | | | | | | | | GSGNTDYAQKFQERVTITRDVSTSTAYM |
| | | | | | | | | | ELSSLRSEDTAVYYCAAPRCSGGSCYDGF |
| | | | | | | | | | DIWGQGTMVTVSS |
| MR10 | Nb | SARS-CoV2 | | | | S; RBD | Phage Display | 988 | QVQLVESGGGLVQAGGSLRLSCAASGF |
| | | | | | | | Library (Nanobody, | | PVANTWMEWYRQAPGKEREWVAAITS |
| | | | | | | | non-immune) | | YGYRTYYADSVKGRFTISRDNAKNTVYL |
| | | | | | | | | | QMNSLKPEDTAVYYCNVKDEGATTKVY |
| | | | | | | | | | DYWGQGTQVTVSS |
| MR14 | Nb | SARS-CoV2 | | | | S; RBD | Phage Display | 989 | QVQLVESGGGLVQAGGSLRLSCAASGF |
| | | | | | | | Library (Nanobody, | | PVMYTHMHWYRQAPGKEREWVAAIV |
| | | | | | | | non-immune) | | SLGEYTTYADSVKGRFTISRDNAKNTVYL |
| | | | | | | | | | QMNSLKPEDTAVYYCNVKDWGAANKY |
| | | | | | | | | | YDYWGQGTQVTVSS |
| MR17 | Nb | SARS-CoV2 | | | | S; RBD | Phage Display | 990 | QVQLVESGGGLVQAGGSLRLSCAASGF |
| | | | | | | | Library (Nanobody, | | PVEVWRMEWYRQAPGKEREGVAAIES |
| | | | | | | | non-immune) | | YGHGTRYADSVKGRFTISRDNAKNTVYL |
| | | | | | | | | | QMNSLKPEDTAVYYCNVKDDGQLAYHY |
| | | | | | | | | | DYWGQGTQVTVSS |
| MR17_K56W | Nb | SARS-CoV2 | | | | S; RBD | Derived from MR17 | 991 | QVQLVESGGGLVQAGGSLRLSCAASGF |
| | | | | | | | | | PVEVWRMEWYRQAPGKEREGVAAIES |
| | | | | | | | | | YGWGTRYADSVKGRFTISRDNAKNTVYL |
| | | | | | | | | | QMNSLKPEDTAVYYCNVKDDGQLAYHY |
| | | | | | | | | | DYWGQGTQVTVSS |
| MR17_K99W | Nb | SARS-CoV2 | | | | S; RBD | Derived from MR17 | 992 | QVQLVESGGGLVQAGGSLRLSCAASGF |
| | | | | | | | | | PVEVWRMEWYRQAPGKEREGVAAIES |
| | | | | | | | | | YGHGTRYADSVKGRFTISRDNAKNTVYL |
| | | | | | | | | | QMNSLKPEDTAVYYCNVWDDGQLAYH |
| | | | | | | | | | YDYWGQGTQVTVSS |
| MR17_K99Y | Nb | SARS-CoV2 | | | | S; RBD | Derived from MR17 | 993 | QVQLVESGGGLVQAGGSLRLSCAASGF |
| | | | | | | | | | PVEVWRMEWYRQAPGKEREGVAAIES |
| | | | | | | | | | YGHGTRYADSVKGRFTISRDNAKNTVYL |
| | | | | | | | | | QMNSLKPEDTAVYYCNVYDDGQLAYHY |
| | | | | | | | | | DYWGQGTQVTVSS |
| MR2 | Nb | SARS-CoV2 | | | | S; RBD | Phage Display | 994 | QVQLVESGGGLVQAGGSLRLSCAASGF |
| | | | | | | | Library (Nanobody, | | PVYFSYMAWYRQAPGKEREWVAAINSE |
| | | | | | | | non-immune) | | GDSTTYADSVKGRFTISRDNAKNTVYLQ |
| | | | | | | | | | MNSLKPEDTAVYYCNVKDYGWYNSQY |
| | | | | | | | | | DYWGQGTQVTVSS |
| MR3 | Nb | SARS-CoV2 | | | | S; RBD | Phage Display | 995 | QVQLVESGGGLVQAGGSLRLSCAASGF |
| | | | | | | | Library (Nanobody, | | PVNAHFMYWYRQAPGKEREWVAAIYS |
| | | | | | | | non-immune) | | YGRTLYADSVKGRFTISRDNAKNTVYLQ |
| | | | | | | | | | MNSLKPEDTAVYYCNVKDYGAASWEYD |
| | | | | | | | | | YWGQGTQVTVSS |
| MR4 | Nb | SARS-CoV2 | | | | S; RBD | Phage Display | 996 | QVQLVESGGGLVQAGGSLRLSCAASGF |
| | | | | | | | Library (Nanobody, | | PMYAWEMAWYRQAPGKEREWVAAIR |
| | | | | | | | non-immune) | | SMGVHTHYSDSVKGRFTISRDNAKNTV |
| | | | | | | | | | YLQMNSLKPEDTAVYYCNVKDFGGHQA |
| | | | | | | | | | YYDYWGQGTQVTVSS |
| MR6 | Nb | SARS-CoV2 | | | | S; RBD | Phage Display | 997 | QVQLVESGGGLVQAGGSLRLSCAASGF |
| | | | | | | | Library (Nanobody, | | PVEDTWMEWYRQAPGKEREWVAAITS |
| | | | | | | | non-immune) | | WGFKTYYADSVKGRFTISRDNAKNTVYL |
| | | | | | | | | | QMNSLKPEDTAVYYCNVKDEGDTSASY |
| | | | | | | | | | DYWGQGTQVTVSS |
| MR7 | Nb | SARS-CoV2 | | | | S; RBD | Phage Display | 998 | QVQLVESGGGLVQAGGSLRLSCAASGF |
| | | | | | | | Library (Nanobody, | | PVNSWMEWYRQAPGKEREWVAAITSY |
| | | | | | | | non-immune) | | GYKTYYADSVKGRFTISRDNAKNTVYLQ |
| | | | | | | | | | MNSLKPEDTAVYYCNVKDEGYFSDEYDY |
| | | | | | | | | | WGQGTQVTVSS |
| MR8 | Nb | SARS-CoV2 | | | | S; RBD | Phage Display | 999 | QVQLVESGGGLVQAGGSLRLSCAASGF |
| | | | | | | | Library (Nanobody, | | PVEWAHMHWYRQAPGKEREWVAAIV |
| | | | | | | | non-immune) | | SAGHYTVYADSVKGRFTISRDNAKNTVY |
| | | | | | | | | | LQMNSLKPEDTAVYYCNVKDWGSSNQ |
| | | | | | | | | | YYDYWGQGTQVTVSS |
| Nb11 | Nb | SARS-CoV2 | | SARS-CoV2 | | S; RBD | Yeast Display | | ND |
| | | | | | | | Library (scFv, | | |
| | | | | | | | human) | | |
| Nb11-59 | Nb | SARS-CoV1, | | SARS-CoV1, | | S; RBD | Phage Display | | ND |
| | | SARS-CoV2 | | SARS-CoV2 | | | (Immunised Camel) | | |
| Nb3 | Nb | SARS-CoV2 | | SARS-CoV2 | | S; RBD | Yeast Display | | ND |
| | | | | | | | Library (scFv, | | |
| | | | | | | | human) | | |
| Nb3-bi | Nb | SARS-CoV2 | | SARS-CoV2 | | S; RBD | Yeast Display | | ND |
| | | | | | | | Library (scFv, | | |
| | | | | | | | human) | | |
| Nb3-tri | Nb | SARS-CoV2 | | SARS-CoV2 | | S; RBD | Yeast Display | | ND |
| | | | | | | | Library (scFv, | | |
| | | | | | | | human) | | |
| Nb4-43 | Nb | SARS-CoV2 | SARS-CoV1 | SARS-CoV2 | SARS-CoV1 | S; RBD | Phage Display | | ND |
| | | | | | | | (Immunised Camel) | | |
| Nb6 | Nb | SARS-CoV2 | | SARS-CoV2 | | S; RBD | Yeast Display | | ND |
| | | | | | | | Library (scFv, | | |
| | | | | | | | human) | | |
| Nb6-tri | Nb | SARS-CoV2 | | SARS-CoV2 | | S; RBD | Yeast Display | | ND |
| | | | | | | | Library (scFv, | | |
| | | | | | | | human) | | |
| NIH- | Nb | SARS-CoV2 | | | | S; RBD | Immunised Llama | 1000 | DVQLQESGGDLVQPGGSLRLSCAASGF |
| CoVnb- | | | | | | | | | TLDYYAIGWFRQAPGKEREGVSCISSSD |
| 101 | | | | | | | | | GSTYYADSVKGRFTSSRDNAKNTVYLQ |
| | | | | | | | | | MNSLKPEDTAVYYCAAVPSTYYNGSYYY |
| | | | | | | | | | TCHPGGMDYWGKGTQVTVSS |
| NIH- | Nb | SARS-CoV2 | | | | S; RBD | Immunised Llama | 1001 | DVQLQESGGGLVQPGGSLRLSCAVSGF |
| CoVnb- | | | | | | | | | TLDYYAIGWFRQAPGKEREGVSCISSSD |
| 102 | | | | | | | | | GSTYYADSVKGRFTSSRDNAKNTVYLQ |
| | | | | | | | | | MNSLKPEDTAVYYCAAVPSTYYSGTYYY |
| | | | | | | | | | NCHPGGMDYWGKGTQVTVSS |
| NIH- | Nb | SARS-CoV2 | | | | S; RBD | Immunised Llama | 1002 | DVQLQESGGGLVQPGGSLRLSCAASGL |
| CoVnb- | | | | | | | | | TLDYYTIGWFRQAPGKEREGVSCISSSD |
| 103 | | | | | | | | | DSTYYADSVKGRFTISRDNAKNTVYLQM |
| | | | | | | | | | NSLKPEDTAVYYCATAPGTYYKGSYYPM |
| | | | | | | | | | CHYYGMDYWGKGTQVTVSS |
| NIH- | Nb | SARS-CoV2 | | | | S; RBD | Immunised Llama | 1003 | DVQLQESGGGLVQPGGSLRLSCAVSGF |
| CoVnb- | | | | | | | | | TLDYYAIGWFRQAPGKEREGVACISSSD |
| 104 | | | | | | | | | GTTYYADSVKGRFTISRDNAKNTVYLQM |
| | | | | | | | | | NSLKPEDTAVYYCATRPLTYYSGSYYTTCS |
| | | | | | | | | | DYGMDYWGKGTLVTVSS |
| NIH- | Nb | SARS-CoV2 | | | | S; RBD | Immunised Llama | 1004 | DVQLQESGGGLVQPGGSLRLSCAASGF |
| CoVnb- | | | | | | | | | TLDYYAIGWFRQAPGKEREGVSCISNSD |
| 105 | | | | | | | | | GSTYYADSVKGRFTTSRDNAKNTVYLQ |
| | | | | | | | | | MNSLKPEDTAVYYCAAVPSTYYSGSYYYT |
| | | | | | | | | | CHPGGMDYWGKGTQVTVSS |
| NIH- | Nb | SARS-CoV2 | | | | S; RBD | Immunised Llama | 1005 | DVQLQESGGGLVQSGGSLRLSCAASGF |
| CoVnb- | | | | | | | | | TLDYYAIGWFRQAPGKEREGVSCISNSD |
| 106 | | | | | | | | | GSTYYADSVKGRFTTSRDNAKNTVYLQ |
| | | | | | | | | | MNSLKPEDTAVYYCAAVPSTYYSGSYYYT |
| | | | | | | | | | CHPGGMDYWGKGTQVTVSS |
| NIH- | Nb | SARS-CoV2 | | | | S; RBD | Immunised Llama | 1006 | DVQLQESGGGLVQPGGSLRLSCAASGF |
| CoVnb- | | | | | | | | | TLDYYAIGWFRQAPGKEREGVSCISNSD |
| 107 | | | | | | | | | GSTYYADSVKGRFTTSRDNAKNTVYLQ |
| | | | | | | | | | MNSLKPEDTAVYYCAAVPSTYYSGSYYYT |
| | | | | | | | | | CHPGGMDYWGKGTLVTVSS |
| NIH- | Nb | SARS-CoV2 | | | | S; RBD | Immunised Llama | 1007 | DVQLQESGGGLVQPGGSLRLSCAASGF |
| CoVnb- | | | | | | | | | TLDYYAIGWFRQAPGKEREGVSCISNSG |
| 108 | | | | | | | | | GSTYYADSVKGRFTTSRDNAKNTVYLQ |
| | | | | | | | | | MNSLKPEDTAVYYCAAVPSTYYSGSYYYT |
| | | | | | | | | | CHPGGMDYWGKGTQVTVSS |
| NIH- | Nb | SARS-CoV2 | | | | S; RBD | Immunised Llama | 1008 | DVQLQESGGGLVQSGGSLRLSCAASGF |
| CoVnb- | | | | | | | | | TLDYYAIGWFRQAPGKEREGVSCITNSD |
| 109 | | | | | | | | | GSTYYADSVKGRFTTSRDNAKNTVYLQ |
| | | | | | | | | | MNSLKPEDTAVYYCASFPSTYYSGSYYYT |
| | | | | | | | | | CHPGGMDYWGKGTQVTVSS |
| NIH- | Nb | SARS-CoV2 | | | | S; RBD | Immunised Llama | 1009 | DVQLQESGGGLVQPGGSLRLSCAASGF |
| CoVnb- | | | | | | | | | TLDYYAIGWFRQAPGKEREGVSCISSSD |
| 110 | | | | | | | | | GSTYYADSVKGRFTISRDNAKNTVYLQM |
| | | | | | | | | | NSLKPDDTAVYYCAAALSEGGYTIDGSS |
| | | | | | | | | | WCYHSVYGMDYWGKGTQVTVSS |
| NIH- | Nb | SARS-CoV2 | | | | S; RBD | Immunised Llama | 1010 | DVQLQESGGGSVEAGGSLRLSCAASGV |
| CoVnb- | | | | | | | | | TLDYYAIGWFRQAPGKEREGVSCISSSD |
| 111 | | | | | | | | | GSTYYADSVKGRFTTSRDNAKNTVYLQ |
| | | | | | | | | | MNSLKPEDTADYYCAAVPSTYYSGTYYY |
| | | | | | | | | | NCHPGAMHYWGKGTQVTVSS |
| NIH- | Nb | SARS-CoV2 | | | | S; RBD | Immunised Llama | 1011 | DVQLQESGGGLVQPGGSLRLSCAASGL |
| CoVnb- | | | | | | | | | TLDYYAIGWFRQAPGKEREGVSCISSSD |
| 112 | | | | | | | | | GSTYYADSVKGRFTTSRDNAKNTVYLQ |
| | | | | | | | | | MNSLKPEDTAVYYCAAVPSTYYSGTYYY |
| | | | | | | | | | TCHPGGMDYWGKGTQVTVSS |
| NIH- | Nb | SARS-CoV2 | | | | S; RBD | Immunised Llama | 1012 | DVQLQESGGGLVQPGGSLRLSCAASGL |
| CoVnb- | | | | | | | | | TLDYYAIGWFRQAPGKEREGVSCISSSD |
| 113 | | | | | | | | | GSTYYADSVKGRFTTSRDNAKNTVYLQ |
| | | | | | | | | | MNSLKPEDTAVYYCAAVPSTYYSGTYYY |
| | | | | | | | | | TCHPGGMDYWGKGTLVTVSS |
| P2B-2F6 | Ab | SARS-CoV2 | SARS-CoV1 | SARS-CoV2 | | S; RBD | B-cells; SARS-CoV2 | 1013 | QVQLQESGPGLVKPSETLSLTCTVSGYSI |
| | | | | | | | Human Patient | | SSGYYWGWIRQPPGKGLEWIGSIYHSG |
| | | | | | | | | | STYYNPSLKTRVTISVDTSKNQFSLKLSSV |
| | | | | | | | | | TAADTAVYYCARAVVGIVVVPAAGRRAF |
| | | | | | | | | | DIWGQGTMVTVSS |
| S110 | Ab | SARS-CoV1, | | SARS-CoV1 | | S; | B-cells; SARS-CoV1 | | ND |
| | | SARS-CoV2 | | | | RBD + non- | Human Patient | | |
| S124 | Ab | SARS-CoV1, | | SARS-CoV1 | | S; RBD | B-cells; SARS-CoV1 | | ND |
| | | SARS-CoV2 | | | | | Human Patient | | |
| S303 | Ab | SARS-CoV1, | | SARS-CoV1 | | S; RBD | B-cells; SARS-CoV1 | | ND |
| | | SARS-CoV2 | | | | | Human Patient | | |
| S304 | Ab | SARS-CoV1, | | SARS-CoV1, | | S; RBD | B-cells; SARS-CoV1 | | ND |
| | | SARS-CoV2 | | SARS-CoV2 | | | Human Patient | | |
| S306 | Ab | SARS-CoV1, | | SARS-CoV1 | SARS-CoV2 | S; non- | B-cells; SARS-CoV1 | | ND |
| | | SARS-CoV2 | | | | RBD | Human Patient | | |
| S309 | Ab | SARS-CoV1, | | SARS-CoV2 | | S; RBD | B-cells; SARS-CoV1 | 1014 | QVQLVQSGAEVKKPGASVKVSCKASGY |
| | | SARS-CoV2 | | and SARS- | | | Human Patient | | PFTSYGISWVRQAPGQGLEWMGWIST |
| | | | | CoV1 | | | | | YNGNTNYAQKFQGRVTMTTDTSTTTGY |
| | | | | | | | | | MELRRLRSDDTAVYYCARDYTRGAWFG |
| | | | | | | | | | ESLIGGFDNWGQGTLVTVSS |
| S310 | Ab | SARS-CoV1, | | SARS-CoV1 | | S; non- | B-cells; SARS-CoV1 | | ND |
| | | SARS-CoV2 | | | | RBD | Human Patient | | |
| S315 | Ab | SARS-CoV1, | | SARS-CoV2 | | S; RBD | B-cells; SARS-CoV1 | | ND |
| | | SARS-CoV2 | | and SARS- | | | Human Patient | | |
| | | | | CoV1 | | | | | |
| Sb#1 | Nb | SARS-CoV2 | | | | S; RBD | Phage Display | 1015 | QVQLVESGGGLVQAGGSLRLSCAASGF |
| | | | | | | | Library (Nanobody, | | PVRKANMHWYRQAPGKEREWVAAIM |
| | | | | | | | non-immune) | | SKGEQTVYADSVEGRFTISRDNAKNTVY |
| | | | | | | | | | LQMNSLKPEDTAVYYCRVFVGWHYFG |
| | | | | | | | | | QGTQVTVS |
| Sb#10 | Nb | SARS-CoV2 | | | | S; RBD | Phage Display | 1016 | QVQLVESGGGLVQAGGSLRLSCAASGF |
| | | | | | | | Library (Nanobody, | | PVQSHYMRWYRQAPGKEREWVAAIES |
| | | | | | | | non-immune) | | TGHHTAYADSVKGRFTISRDNAKNTVYL |
| | | | | | | | | | QMNSLKPEDTAVYYCTVYVGYEYHGQG |
| | | | | | | | | | TQVTVS |
| Sb#11 | Nb | SARS-CoV2 | | | | S; RBD | Phage Display | 1017 | QVQLVESGGGLVQAGGSLRLSCAASGF |
| | | | | | | | Library (Nanobody, | | PVETENMHWYRQAPGKEREWVAAIYS |
| | | | | | | | non-immune) | | HGMWTAYADSVKGRFTISRDNTKNTVY |
| | | | | | | | | | LQMNSLKPEDTAVYYCEVEVGKWYFGQ |
| | | | | | | | | | GTQVTVS |
| Sb#12 | Nb | SARS-CoV2 | | | | S; RBD | Phage Display | 1018 | QVQLVESGGGLVQAGGSLRLSCAASGF |
| | | | | | | | Library (Nanobody, | | PVKASRMYWYRQAPGKEREWVAAIQS |
| | | | | | | | non-immune) | | FGEVTWYADSVKGRFTISRDNAKNTVYL |
| | | | | | | | | | QMNSLKPEDTAVYYCYVWVGQEYWG |
| | | | | | | | | | QGTQVTVS |
| Sb#13 | Nb | SARS-CoV2 | | | | S; RBD | Phage Display | 1019 | QVQLVESGGGLVQAGGSLRLSCAASGF |
| | | | | | | | Library (Nanobody, | | PVYASNMHWYRQAPGKEREWVAAIES |
| | | | | | | | non-immune) | | QGYMTAYADSVKGRFTISRDNAKNTVY |
| | | | | | | | | | LQMNSLKPEDTAVYYCWVIVGEYYVGQ |
| | | | | | | | | | GTQVTVS |
| Sb#14 | Nb | SARS-CoV2 | | | | S; RBD | Phage Display | 1020 | QVQLVESGGGLVQAGGSLRLSCAASGF |
| | | | | | | | Library (Nanobody, | | PVQAREMEWYRQAPGKEREWVAAIKS |
| | | | | | | | non-immune) | | TGTYTAYAYSVKGRFTISRDNAKNTVYLQ |
| | | | | | | | | | MNSLKPEDTAVYYCYVYVGSSYIGQGTQ |
| | | | | | | | | | VTVS |
| Sb#15 | Nb | SARS-CoV2 | | | | S; RBD | Phage Display | 1021 | QVQLVESGGGLVQAGGSLRLSCAASGF |
| | | | | | | | Library (Nanobody, | | PVKNFEMEWYRKAPGKEREWVAAIQS |
| | | | | | | | non-immune) | | GGVETYYADSVKGRFTISRDNAKNTVYL |
| | | | | | | | | | QMNSLKPEDTAVYYCFVYVGRSYIGQGT |
| | | | | | | | | | QVTVS |
| Sb#16 | Nb | SARS-CoV2 | | | | S; RBD | Phage Display | 1022 | QVQLVESGGGLVQAGGSLRLSCAASGF |
| | | | | | | | Library (Nanobody, | | PVAYKTMWWYRQAPGKEREWVAAIES |
| | | | | | | | non-immune) | | YGIKWTRYADSVKGRFTISRDNAKNTVY |
| | | | | | | | | | LQMNSLKPEDTAVYYCIVWVGAQYHG |
| | | | | | | | | | QGTQVTVS |
| Sb#17 | Nb | SARS-CoV2 | | | | S; RBD | Phage Display | 1023 | QVQLVESGGGLVQAGGSLRLSCAASGF |
| | | | | | | | Library (Nanobody, | | PVAGRNMWWYRQAPGKEREWVAAIY |
| | | | | | | | non-immune) | | SSGTYTEYADSVKGRFTISRDNAKNTVYL |
| | | | | | | | | | QMNSLKPEDTAVYYCHVWVGSLYKGQ |
| | | | | | | | | | GTQVTVS |
| Sb#18 | Nb | SARS-CoV2 | | | | S; RBD | Phage Display | 1024 | QVQLVESGGGLVQAGGSLRLSCAASGF |
| | | | | | | | Library (Nanobody, | | PVKHARMWWYRQAPGKEREWVAAID |
| | | | | | | | non-immune) | | SHGDTTWYADSVKGRFTISRDNAKNTV |
| | | | | | | | | | YLQMNSLKPEDTAVYYCYVYVGASYWG |
| | | | | | | | | | QGTQVTVS |
| Sb#19 | Nb | SARS-CoV2 | | | | S; RBD | Phage Display | 1025 | QVQLVESGGGLVQAGGSLRLSCAASGF |
| | | | | | | | Library (Nanobody, | | PVNSHEMTWYRQAPGKEREWVAAIQS |
| | | | | | | | non-immune) | | TGTVTEYADSVKGRFTISRDNAKNTVYL |
| | | | | | | | | | QMNSLKPEDTAVYYCYVYVGSSYLGQG |
| | | | | | | | | | TQVTVS |
| Sb#2 | Nb | SARS-CoV2 | | | | S; RBD | Phage Display | 1026 | QVQLVESGGGLVQAGGSLRLSCATSGF |
| | | | | | | | Library (Nanobody, | | PVYQANMHWYRQAPGKEREWVAAIQ |
| | | | | | | | non-immune) | | SYGDGTHYADSVKGRFTISRDNAKNTVY |
| | | | | | | | | | LQMNSLKPEDTAVYYCRAVYVGMHYFG |
| | | | | | | | | | QGTQVTVS |
| Sb#20 | Nb | SARS-CoV2 | | | | S; RBD | Phage Display | 1027 | QVQLVESGGGLVQAGGSLRLSCAASGF |
| | | | | | | | Library (Nanobody, | | PVEQREMEWYRQAPGKEREWVAAIDS |
| | | | | | | | non-immune) | | NGNYTFYADSVKGRFTISRDNAKNTVYL |
| | | | | | | | | | QMNSLKPEDTAVYYCYVYVGKSYIGQGT |
| | | | | | | | | | QVTVS |
| Sb#21 | Nb | SARS-CoV2 | | | | S; RBD | Phage Display | 1028 | QVQLVESGGGLVQAGGSLRLSCAASGF |
| | | | | | | | Library (Nanobody, | | PVKHHWMFWYRQAPGKEREWVAAIK |
| | | | | | | | non-immune) | | SYGYGTEYADSVKGRFTISRDNAKNTVYL |
| | | | | | | | | | QMNSLKPEDTAVYYCFVGVGTHYAGQ |
| | | | | | | | | | GTQVTVS |
| Sb#22 | Nb | SARS-CoV2 | | | | S; RBD | Phage Display | 1029 | QVQLVESGGGLVQAGGSLRLSCAASGF |
| | | | | | | | Library (Nanobody, | | PVYAAEMEWYRQAPGKEREWVAAISS |
| | | | | | | | non-immune) | | QGTITYYADSVKGRFTISRDNAKNTVYLQ |
| | | | | | | | | | MNSLKPEDTAVYYCFVYVGKSYIGQGTQ |
| | | | | | | | | | VSVS |
| Sb#23 | Nb | SARS-CoV2 | | | | S; RBD | Phage Display | 1030 | QVQLVESGGGLVQAGGSLRLSCAASGF |
| | | | | | | | Library (Nanobody, | | PVYAAEMEWYRQAPGKEREWVAAISS |
| | | | | | | | non-immune) | | QGTITYYADSVKGRFTISRDNAKNTVYLQ |
| | | | | | | | | | MNSLKPEDTAVYYCFVYVGKSYIGQGTQ |
| | | | | | | | | | VSVS |
| Sb#25 | Nb | SARS-CoV2 | | | | S; RBD | Phage Display | 1031 | QVQLVESGGGLVQAGGSLRLSCAASGF |
| | | | | | | | Library (Nanobody, | | PVHAWEMAWYRQAPGKEREWVAAIR |
| | | | | | | | non-immune) | | SFGSSTHYADSVKGRFTISRDNAKNTVYL |
| | | | | | | | | | QMNSLKPEDTAVYYCNVKDFGTHHYAY |
| | | | | | | | | | DYWGQGTQVTVS |
| Sb#26 | Nb | SARS-CoV2 | | | | S; RBD | Phage Display | 1032 | QVQLVESGGGLVQAGGSLRLSCAASGF |
| | | | | | | | Library (Nanobody, | | PVNTWWMHWYRQAPGKEREWVAAIT |
| | | | | | | | non-immune) | | SWGFRTYYADSVKGRFTISRDNAKNTVY |
| | | | | | | | | | LQMNSLKPEDTAVYYCNVKDKGMAVQ |
| | | | | | | | | | WYDYWGQGTQVTVS |
| Sb#27 | Nb | SARS-CoV2 | | | | S; RBD | Phage Display | 1033 | QVQLVESGGGLVQAGGSLRLSCAASGF |
| | | | | | | | Library (Nanobody, | | PVYNTWMEWYRQAPGKEREWVAAITS |
| | | | | | | | non-immune) | | HGYKTYYADSVKGRFTISRDNAKNTVYL |
| | | | | | | | | | QMNSLKPEDTAVYYCNVKDEGDMFTA |
| | | | | | | | | | YDYWGQGTQVTVS |
| Sb#28 | Nb | SARS-CoV2 | | | | S; RBD | Phage Display | 1034 | QVQLVESGGGLVQAGGSLRLSCAASGF |
| | | | | | | | Library (Nanobody, | | PVYHSTMFWYRQAPGKEREWVAAIYSS |
| | | | | | | | non-immune) | | GQHTYYADSVKGRFTISRDNAKNTVYLQ |
| | | | | | | | | | MNSLKPEDTAVYYCNVKDSGQWRQEY |
| | | | | | | | | | DYWGQGTQVTVS |
| Sb#29 | Nb | SARS-CoV2 | | | | S; RBD | Phage Display | 1035 | QVQLVESGGGLVQAGGSLRLSCAASGF |
| | | | | | | | Library (Nanobody, | | PVEHEMAWYRQAPGKEREWVAAIRS |
| | | | | | | | non-immune) | | MGRKTLYADSVKGRFTISRDNAKNTVYL |
| | | | | | | | | | QMNSLKPEDTAVYYCNVKDFGYTWHEY |
| | | | | | | | | | DYWGQGTQVTVS |
| Sb#3 | Nb | SARS-CoV2 | | | | S; RBD | Phage Display | 1036 | QVQLVESGGGLVQAGGSLRLSCAASGF |
| | | | | | | | Library (Nanobody, | | PVNYKTMWWYRQAPGKEREWVAAIW |
| | | | | | | | non-immune) | | SYGHTTHYADSVKGRFTISRDNAKNTVY |
| | | | | | | | | | LQMNSLKPEDTAVYYCVVWVGHNYEG |
| | | | | | | | | | QGTQVTVS |
| Sb#30 | Nb | SARS-CoV2 | | | | S; RBD | Phage Display | 1037 | QVQLVESGGGLVQAGGSLRLSCAASGF |
| | | | | | | | Library (Nanobody, | | PVTMAWMWWYRQAPGKEREWVAAI |
| | | | | | | | non-immune) | | RSEGVRTYYADSVKGRFTISRDNAKNTV |
| | | | | | | | | | YLQMNSLKPEDTAVYYCNVKDYGQAHA |
| | | | | | | | | | YYDYWGQGTQVTVS |
| Sb#31 | Nb | SARS-CoV2 | | | | S; RBD | Phage Display | 1038 | QVQLVESGGGLVQAGGSLRLSCAASGF |
| | | | | | | | Library (Nanobody, | | PVNSHFMEWYRQAPGKEREWVAAIQH |
| | | | | | | | non-immune) | | SSGFHTYYADSVKGRFTISRDNAKNTVYL |
| | | | | | | | | | QMNSLKPEDTAVYYCNVKDTGTTEDYD |
| | | | | | | | | | YWGQGTQVTVS |
| Sb#32 | Nb | SARS-CoV2 | | | | S; RBD | Phage Display | 1039 | QVQLDESGGGLVQAGGSLRLSCAASGF |
| | | | | | | | Library (Nanobody, | | PVYHAWMEWYRQAPGKEREWVAAITS |
| | | | | | | | non-immune) | | SGRHTYYADSVKGRFTISRDNAKNTVYL |
| | | | | | | | | | QMNSLKPEDTAVYYCNVKDAGRVYNSY |
| | | | | | | | | | DYWGQGTQVTVS |
| Sb#33 | Nb | SARS-CoV2 | | | | S; RBD | Phage Display | 1040 | QVQLVESGGGLVQAGGSLRLSCAASGF |
| | | | | | | | Library (Nanobody, | | PVAHAWMEWYRQAPGKEREWVAAIT |
| | | | | | | | non-immune) | | SYGYKTYYADSVKGRFTISRDNAKNTVYL |
| | | | | | | | | | QMNSLKPEDTAVYYCNVKDTGTYRFYY |
| | | | | | | | | | DYWGQGTQVTVS |
| Sb#34 | Nb | SARS-CoV2 | | | | S; RBD | Phage Display | 1041 | QVQLVESGGGLVQAGGSLRLSCAASGF |
| | | | | | | | Library (Nanobody, | | PVWNQTMVWYRQAPGKEREWVAAI |
| | | | | | | | non-immune) | | WSMGHTYYADSVKGRFTISRDNAKNTV |
| | | | | | | | | | YLQMNSLKPEDTAVYYCNVKDAGVYNR |
| | | | | | | | | | YYDYWGQGTQVTVS |
| Sb#35 | Nb | SARS-CoV2 | | | | S; RBD | Phage Display | 1042 | QVQLVESGGGLVQAGGSLRLSCAASGF |
| | | | | | | | Library (Nanobody, | | PVEHYWMEWYRQAPGKEREWVAAITS |
| | | | | | | | non-immune) | | FGYRTYYADSVKGRFTISRDNAKNTVYL |
| | | | | | | | | | QMNSLKPEDTAVYYCNVKDWGFASHA |
| | | | | | | | | | YDYWGQGIQVTVS |
| Sb#36 | Nb | SARS-CoV2 | | | | S; RBD | Phage Display | 1043 | QVQLVESGGGLVQAGGSLRLSCAASGF |
| | | | | | | | Library (Nanobody, | | PEIAWEMAWYRQAPGKEREWVAAIRS |
| | | | | | | | non-immune) | | FGERTLYADSVKGRFTISRDNAKNTVYL |
| | | | | | | | | | QMNSLKPEDTAVYYCNVKDFGWQHQE |
| | | | | | | | | | YDYWGQGTQVTVS |
| Sb#37 | Nb | SARS-CoV2 | | | | S; RBD | Phage Display | 1044 | QVQLVESGGGLVQAGGSLRLSCAASGF |
| | | | | | | | Library (Nanobody, | | PVYHAYMEWYRQAPGKEREWVAAIYS |
| | | | | | | | non-immune) | | NGEHTYYADSVKGRFTISRDNAKNTVYL |
| | | | | | | | | | QMNSLKPEDTAVYYCNVKDSGSFNQAY |
| | | | | | | | | | DYWGQGTQVTVS |
| Sb#38 | Nb | SARS-CoV2 | | | | S; RBD | Phage Display | 1045 | QVQLVESGGGLVQAGGSLRLSCAASGF |
| | | | | | | | Library (Nanobody, | | PVEWSHMHWYRQAPGKEREWVAAIV |
| | | | | | | | non-immune) | | SKGGYTLYADSVKGRFTISRDNAKNTVYL |
| | | | | | | | | | QMNSLKPEDTAVYYCNVKDYGVHFKRY |
| | | | | | | | | | DYWGQGTQVTVI |
| Sb#39 | Nb | SARS-CoV2 | | | | S; RBD | Phage Display | 1046 | QVQLVESGGGLVQAGGSLRLSCAASGF |
| | | | | | | | Library (Nanobody, | | PVFHVWMEWYRQAPGKEREWVAAID |
| | | | | | | | non-immune) | | SAGWHTYYADSVKGRFTISRDNAKNTV |
| | | | | | | | | | YLQMNSLKPEDTAVYYCNVKDAGNTTS |
| | | | | | | | | | AYDYWGQGTQVTVS |
| Sb#4 | Nb | SARS-CoV2 | | | | S; RBD | Phage Display | 1047 | QVQLVESGGGLVQAGGSLRLSCAASGF |
| | | | | | | | Library (Nanobody, | | PVYAQNMHWYRQAPGKEREWVAAIYS |
| | | | | | | | non-immune) | | HGYWTLYADSVKGRFTISRDNAKNTVYL |
| | | | | | | | | | QMNSLKPEDTAVYYCEVQVGAWYTGQ |
| | | | | | | | | | GTQVTVS |
| Sb#40 | Nb | SARS-CoV2 | | | | S; RBD | Phage Display | 1048 | QVQLVESGGGLVQAGGSLRLSCAASGF |
| | | | | | | | Library (Nanobody, | | PVYYNWMEWYRQAPGKEREWVAAIH |
| | | | | | | | non-immune) | | SNGDETFYADSVKGRFTISRDNAKNTVY |
| | | | | | | | | | LQMNSLKPEDTAVYYCNVKDIDAEAYAY |
| | | | | | | | | | DYWGQGTQVTVS |
| Sb#41 | Nb | SARS-CoV2 | | | | S; RBD | Phage Display | 1049 | QVQLVESGGGLVQAGGSLRLSCAASGF |
| | | | | | | | Library (Nanobody, | | PVYHVWMEWYRQAPGKEREWVAAITS |
| | | | | | | | non-immune) | | SGSHTYYADSVKGRFTISRDNAKNTVYL |
| | | | | | | | | | QMNSLKPEDTAVYYCNVKDSGQWRVQ |
| | | | | | | | | | YDYWGQGTQVTVS |
| Sb#42 | Nb | SARS-CoV2 | | | | S; RBD | Phage Display | 1050 | QVQLVESGGGLVQAGGSLRLSCAASGF |
| | | | | | | | Library (Nanobody, | | PVYWHHMHWYRQAPGKEREWVAAIIS |
| | | | | | | | non-immune) | | WGWYTTYADSVKGRFTISRDNAKNTVY |
| | | | | | | | | | LQMNSLKPEDTAVYYCNVKDHGAQNQ |
| | | | | | | | | | MYDYWGQGTQVTVS |
| Sb#45 | Nb | SARS-CoV2 | | | | S; RBD | Phage Display | 1051 | QVQLVESGGGLVQAGGSLRLSCAASGF |
| | | | | | | | Library (Nanobody, | | PVYRDRMAWYRQAPGKEREWVAAIYS |
| | | | | | | | non-immune) | | AGQQTRYADSVKGRFTISRDNAKNTVYL |
| | | | | | | | | | QMNSLKPEDTAVYYCNVKDVGHHYEYY |
| | | | | | | | | | DYWGQGTQVTVS |
| Sb#46 | Nb | SARS-CoV2 | | | | S; RBD | Phage Display | 1052 | QVQLVESGGGLVQAGGSLRLSCAASGF |
| | | | | | | | Library (Nanobody, | | PVDNGYMHWYRQAPGKEREWVAAID |
| | | | | | | | non-immune) | | SYGWHTIYADSVKGRFTISRDNAKNTVY |
| | | | | | | | | | LQMNSLKPEDTAVYYCNVKDKGQMRA |
| | | | | | | | | | AYDYWGQGTQVTVS |
| Sb#47 | Nb | SARS-CoV2 | | | | S; RBD | Phage Display | 1053 | QVQLVESGGGLVQAGGSLRLSCAASGF |
| | | | | | | | Library (Nanobody, | | PVSWHSMYWYRQAPGKEREWVAAIFS |
| | | | | | | | non-immune) | | EGDWTYYADSVKGRFTISRDNAKNTVYL |
| | | | | | | | | | QMNSLKPEDTAVYYCNVKDYGSSYYKY |
| | | | | | | | | | DYWGQGTQVTVS |
| Sb#48 | Nb | SARS-CoV2 | | | | S; RBD | Phage Display | 1054 | QVQLVESGGGLVQAGGSLRLSCAASGF |
| | | | | | | | Library (Nanobody, | | PVSQSVMAWYRQAPGKEREWVAAIYS |
| | | | | | | | non-immune) | | KGQYTHYADSVKGRFTISRDNAKNTVYL |
| | | | | | | | | | QMNSLKPEDTAVYYCNVKDAGSSYWD |
| | | | | | | | | | YDYWGQGTQVTVS |
| Sb#49 | Nb | SARS-CoV2 | | | | S; RBD | Phage Display | 1055 | QVQLVESGGGSVQAGGSLRLSCAASGSI |
| | | | | | | | Library (Nanobody, | | GQIEYLGWFRQAPGKEREGVAALNTW |
| | | | | | | | non-immune) | | TGRTYYADSVKGRFTVSLDNAKNTVYLQ |
| | | | | | | | | | MNSLKPEDTALYYCAAARWGRTKPLNT |
| | | | | | | | | | YYYSYWGQGTPVTVS |
| Sb#5 | Nb | SARS-CoV2 | | | | S; RBD | Phage Display | 1056 | QVQLVESGGGLVQAGGSLRLSCAASGF |
| | | | | | | | Library (Nanobody, | | PVFSGHMHWYRQAPGKEREWVAAILS |
| | | | | | | | non-immune) | | NGDSTHYADSVKGRFTISRDNAKNTVYL |
| | | | | | | | | | QMNSLKPEDTAVYYCRVHVGAHYFGQ |
| | | | | | | | | | GTQVTVS |
| Sb#50 | Nb | SARS-CoV2 | | | | S; RBD | Phage Display | 1057 | QVQLVESGGGSVQAGGSLRLSCAASGYI |
| | | | | | | | Library (Nanobody, | | DKIVYLGWFRQAPGKEREGVAALYTLSG |
| | | | | | | | non-immune) | | HTYYADSVKGRFTVSLDNAKNTVYLQM |
| | | | | | | | | | NSLKPEDTALYYCAAATEGHAHALYRLH |
| | | | | | | | | | YYWGQGTQVTVS |
| Sb#51 | Nb | SARS-CoV2 | | | | S; RBD | Phage Display | 1058 | QVQLVESGGGLVQAGGSLRLSCAASGF |
| | | | | | | | Library (Nanobody, | | PVYQGEMHWYRQAPGKEREWVAAIRS |
| | | | | | | | non-immune) | | TGVQTWYADSVKGRFTISRDNAKNTVY |
| | | | | | | | | | LQMNSLKPEDTAVYYCRVWVGTHYFG |
| | | | | | | | | | QGTQVTVS |
| Sb#52 | Nb | SARS-CoV2 | | | | S; RBD | Phage Display | 1059 | QVQLVESGGGSVQAGGSLRLSCAASGN |
| | | | | | | | Library (Nanobody, | | IQRIYYLGWFRQAPGKEREGVAALMTYT |
| | | | | | | | non-immune) | | GHTYYADSVKGRFTVSLDNAKNTVYLQ |
| | | | | | | | | | MNSLKPEDTALYYCAAAYVGAENPLPYS |
| | | | | | | | | | MYGYWGQGTQVTVS |
| Sb#53 | Nb | SARS-CoV2 | | | | S; RBD | Phage Display | 1060 | QVQLVESGGGSVQAGGSLRLSCAASGQ |
| | | | | | | | Library (Nanobody, | | ISHIKYLGWFRQAPGKEREGVAALITRW |
| | | | | | | | non-immune) | | GQTYYADSVKGRFTVSLDNAKNTVYLQ |
| | | | | | | | | | MNSLKPEDTALYYCAAADYGASDPLWFI |
| | | | | | | | | | HYLYWGQGTQVTVS |
| Sb#55 | Nb | SARS-CoV2 | | | | S; RBD | Phage Display | 1061 | QVQLVESGGGSVQAGGSLRLSCAASGKI |
| | | | | | | | Library (Nanobody, | | WTIKYLGWFRQAPGKEREGVAALMTR |
| | | | | | | | non-immune) | | WGYTYYADSVKGRFTVSLDNAKNTVYL |
| | | | | | | | | | QMNSLKPEDTALYYCAAANYGSNFPLAE |
| | | | | | | | | | EDYWYWGQGTQVTVS |
| Sb#56 | Nb | SARS-CoV2 | | | | S; RBD | Phage Display | 1062 | QVQLVESGGGSVQAGGSLRLSCAASGN |
| | | | | | | | Library (Nanobody, | | ISQIHYLGWFRQAPGKEREGVAALNTDY |
| | | | | | | | non-immune) | | GYTYYADSVKGRFTVSLDNAKNTVYLQ |
| | | | | | | | | | MNSLKPEDTALYYCAAAYYFGDDIPLW |
| | | | | | | | | | WEAYSYWGQGTQVTVS |
| Sb#58 | Nb | SARS-CoV2 | | | | S; RBD | Phage Display | 1063 | QVQLVESGGGSVQAGGSLRLSCAASGN |
| | | | | | | | Library (Nanobody, | | ISTIEYLGWFRQAPGKEREGVAALYTWH |
| | | | | | | | non-immune) | | GQTYYADSVKGRFTVSLDNAKNTVYLQ |
| | | | | | | | | | MNSLKPEDTALYYCAAARWGRHMPLS |
| | | | | | | | | | ATEYSYWGQGTQVTVS |
| Sb#59 | Nb | SARS-CoV2 | | | | S; RBD | Phage Display | 1064 | QVQLVESGGGSVQAGGSLRLSCAASGN |
| | | | | | | | Library (Nanobody, | | IESIYYLGWFRQAPGKEREGVAALWTG |
| | | | | | | | non-immune) | | DGETYYADSVKGRFTVSLDNAKNTVYLQ |
| | | | | | | | | | MNSLKPEDTALYYCAAAAWGNSAPLTT |
| | | | | | | | | | YRYYYWGQGTQVTVS |
| Sb#6 | Nb | SARS-CoV2 | | | | S; RBD | Phage Display | 1065 | QVQLVESGGGLVQAGGSLRLSCAASGF |
| | | | | | | | Library (Nanobody, | | PVEQGRMYWYRQAPGKEREWVAAIIS |
| | | | | | | | non-immune) | | HGTVTVYADSVKGRFTISRDNAKNTVYL |
| | | | | | | | | | QMNSLKPEDTAVYYCYVYVGAQYWGQ |
| | | | | | | | | | GTQVTVS |
| Sb#61 | Nb | SARS-CoV2 | | | | S; RBD | Phage Display | 1066 | QVQLVESGGGSVQAGGSLRLSCAASGFI |
| | | | | | | | Library (Nanobody, | | YGITYLGWFRQAPGKEREGVAALVTWN |
| | | | | | | | non-immune) | | GQTYYADSVKGRFTVSLDNAKNTVYLQ |
| | | | | | | | | | MNSLKPEDTALYYCAAADWGYDWPLW |
| | | | | | | | | | DEWYWYWGQGTQVTVS |
| Sb#62 | Nb | SARS-CoV2 | | | | S; RBD | Phage Display | 1067 | QVQLVESGGGSVQAGGSLRLSCAASGTI |
| | | | | | | | Library (Nanobody, | | ADIKYLGWFRQAPGKEREGVAALMTR |
| | | | | | | | non-immune) | | WGSTYYADSVKGRFTVSLDNAKNTVYL |
| | | | | | | | | | QMNSLKPEDTALYYCAAANYGANYPLYS |
| | | | | | | | | | QQYSYWGQGTQVTVS |
| Sb#63 | Nb | SARS-CoV2 | | | | S; RBD | Phage Display | 1068 | QVQLVESGGGSVQAGGSLRLSCAASGSI |
| | | | | | | | Library (Nanobody, | | SSIKYLGWFRQAPGKEREGVAALMTRW |
| | | | | | | | non-immune) | | GMTYYADSVKGRFTVSLDNAKNTVYLQ |
| | | | | | | | | | MNSLKPEDTALYYCAAANYGANEPLQY |
| | | | | | | | | | THYNYWGQGTQVTVS |
| Sb#64 | Nb | SARS-CoV2 | | | | S; RBD | Phage Display | 1069 | QVQLVESGGGSVQAGGSLRLSCAASGFI |
| | | | | | | | Library (Nanobody, | | ESIFYLGWFRQAPGKEREGVAALYTYVG |
| | | | | | | | non-immune) | | QTYYADSVKGRFTVSLDNAKNTVYLQM |
| | | | | | | | | | NSLKPEDTALYYCAAASYGAAHPLSIMR |
| | | | | | | | | | YYYWGQGTQVTVS |
| Sb#65 | Nb | SARS-CoV2 | | | | S; RBD | Phage Display | 1070 | QVQLVESGGGSVQAGGSLRLSCAASGTI |
| | | | | | | | Library (Nanobody, | | AHIKYLGWFRQAPGKEREGVAALMTK |
| | | | | | | | non-immune) | | WGQTYYADSVKGRFTVSLDNAKNTVYL |
| | | | | | | | | | QMNSLKPEDTALYYCAAASYGANFPLKA |
| | | | | | | | | | SDYSYWGQGTQVTVS |
| Sb#66 | Nb | SARS-CoV2 | | | | S; RBD | Phage Display | 1071 | QVQLVESGGGSVQAGGSLRLSCAASGSI |
| | | | | | | | Library (Nanobody, | | QAITYLGWFRQAPGKEREGVAALVTW |
| | | | | | | | non-immune) | | NGQTYYADSVKGRFTVSLDNAKNTVYL |
| | | | | | | | | | QMNSLKPEDTALYYCAAADWGYDWPL |
| | | | | | | | | | WDEWYWYWGQGTQVTVS |
| Sb#67 | Nb | SARS-CoV2 | | | | S; RBD | Phage Display | 1072 | QVQLVESGGGSVQAGGSLRLSCAASGSI |
| | | | | | | | Library (Nanobody, | | SSITYLGWFRQAPGKEREGVAALVTYSG |
| | | | | | | | non-immune) | | NTYYADSVKGRFTVSLDNAKNTVYLQM |
| | | | | | | | | | NSLKPEDTALYYCAAATWGHSWPLYND |
| | | | | | | | | | EYWYWGQGSQVTVS |
| Sb#68 | Nb | SARS-CoV2 | | | | S; RBD | Phage Display | 1073 | QVQLVESGGGSVQAGGSLRLSCAASGSI |
| | | | | | | | Library (Nanobody, | | SSITYLGWFRQAPGKEREGVAALITVNG |
| | | | | | | | non-immune) | | HTYYADSVKGRFTVSLDNAKNTVYLQM |
| | | | | | | | | | NSLKPEDTALYYCAAAAWGYAWPLHQ |
| | | | | | | | | | DDYWYWGQGTQVTVS |
| Sb#69 | Nb | SARS-CoV2 | | | | S; RBD | Phage Display | 1074 | QVQLVESGGGSVQAGGSLRLSCAASGSI |
| | | | | | | | Library (Nanobody, | | SSITYLGWFRQAPGKEREGVAALNTFNG |
| | | | | | | | non-immune) | | TTYYADSVKGRFTVSLDNAKNTVYLQM |
| | | | | | | | | | NSLKPEDTALYYCAAATWGYSWPLIAEY |
| | | | | | | | | | NWYWGQGTQVTVS |
| Sb#7 | Nb | SARS-CoV2 | | | | S; RBD | Phage Display | 1075 | QVQLVESGGGLVQAGGSLRLSCAASGF |
| | | | | | | | Library (Nanobody, | | PVLFTYMHWYRQAPGKEREWVAAIWS |
| | | | | | | | non-immune) | | SGNSTWYADSVKGRFTISRDNAKNTVYL |
| | | | | | | | | | QMNSLKPEDTAVYYCFVKVGNWYAGQ |
| | | | | | | | | | GTQVTVS |
| Sb#71 | Nb | SARS-CoV2 | | | | S; RBD | Phage Display | 1076 | QVQLVESGGGSVQAGGSLRLSCAASGSI |
| | | | | | | | Library (Nanobody, | | SSITYLGWFRQAPGKEREGVAALKTQAG |
| | | | | | | | non-immune) | | FTYYADSVKGRFTVSLDNAKNTVYLQM |
| | | | | | | | | | NSLKPEDTALYYCAAANWGYSWPLYEA |
| | | | | | | | | | DDWYWGQGTQVTVS |
| Sb#8 | Nb | SARS-CoV2 | | | | S; RBD | Phage Display | 1077 | QVQLVESGGGLVQAGGSLRLSCAASGF |
| | | | | | | | Library (Nanobody, | | PVNAGNMHWYRQAPGKEREWVAAIQ |
| | | | | | | | non-immune) | | SYGRTTYYADSVKGRFTISRDNAKNTVYL |
| | | | | | | | | | QMNSLKPEDTAVYYCRVFVGMHYFGQ |
| | | | | | | | | | GTQVTVS |
| Sb#9 | Nb | SARS-CoV2 | | | | S; RBD | Phage Display | 1078 | QVQLVESGGGLVQAGGSLRLSCAASGF |
| | | | | | | | Library (Nanobody, | | PVSSSTMTWYRQAPGKEREWVAAINSY |
| | | | | | | | non-immune) | | GWETHYADSVKGRFTISRDNAKNTVYL |
| | | | | | | | | | QMNSLKPEDTAVYYCYVYVGGSYIGQG |
| | | | | | | | | | TQVTVS |
| Sb100 | Nb | SARS-CoV2 | | SARS-CoV2 | | S; RBD | Phage Display | 1079 | QVQLVESGGGSVQAGGSLRLSCAASGSI |
| | | | | | | | Library (Nanobody, | | SSITYLGWFRQAPGKEREGVAALVTSDG |
| | | | | | | | non-immune) | | RTYYADSVKGRFTVSLDNAKNTVYLQM |
| | | | | | | | | | NSLKPEDTALYYCAAANWGYSWPLYQT |
| | | | | | | | | | EYWYWGQGTQVTVSS |
| Sb12 | Nb | SARS-CoV2 | | SARS-CoV2 | | S; RBD | Phage Display | 1080 | QVQLVESGGGLVQAGGSLRLSCAASGF |
| | | | | | | | Library (Nanobody, | | PVQLYWMEWYRQAPGKEREWVAAITS |
| | | | | | | | non-immune) | | DGDYTEYADSVKGRFTISRDNAKNTVYL |
| | | | | | | | | | QMNSLKPEDTAVYYCYVKVGEWYYGQ |
| | | | | | | | | | GTQVTVSS |
| Sb13 | Nb | SARS-CoV2 | | | | S; RBD | Phage Display | 1081 | QVQLVESGGGLVQAGGSLRLSCAASGF |
| | | (weak) | | | | | Library (Nanobody, | | PVENYYMRWYRQAPGKEREWVAAIES |
| | | | | | | | non-immune) | | SGAETRYADSVKGRFTISRDNAKNTVYL |
| | | | | | | | | | QMNSLKPEDTAVYYCYVVVGWGYAGQ |
| | | | | | | | | | GTQVTVSS |
| Sb15 | Nb | SARS-CoV2 | | | | S; RBD | Phage Display | 1082 | QVQLVESGGGLVQAGGSLRLSCAASGF |
| | | | | | | | Library (Nanobody, | | PVYEHYMRWYRQAPGKEREWVAAIQS |
| | | | | | | | non-immune) | | HGNHTAYADSVKGRFTISRDNAKNTVYL |
| | | | | | | | | | QMNSLKPEDTAVYYCFVVVGNGYTGQ |
| | | | | | | | | | GTQVTVSS |
| Sb16 | Nb | SARS-CoV2 | | | | S; RBD | Phage Display | 1083 | QVQLVESGGGLVRAGGSLRLSCAASGF |
| | | | | | | | Library (Nanobody, | | PVASQEMTWYRQAPGKEREWVAAISSS |
| | | | | | | | non-immune) | | GRQTEYADSVKGRFTISRDNAKNTVYLQ |
| | | | | | | | | | MNSLKPEDTAVYYCYVYVGGSYIGQGT |
| | | | | | | | | | QVTVSS |
| Sb17 | Nb | SARS-CoV2 | | SARS-CoV2 | | S; RBD | Phage Display | 1084 | QVQLVESGGGLVQAGGSLRLSCAASGF |
| | | | | | | | Library (Nanobody, | | PVKASEMEWYRQAPGKEREWVAAIASI |
| | | | | | | | non-immune) | | GYNTYYADSVKGRFTISRDNAKNTVYLQ |
| | | | | | | | | | MNSLKPEDTAVYYCLVYVGATYIGQGTQ |
| | | | | | | | | | VTVSS |
| Sb2 | Nb | SARS-CoV2 | | | | S; RBD | Phage Display | 1085 | QVQLVESGGGLVQAGGSLRLSCAASGF |
| | | | | | | | Library (Nanobody, | | PVSNEEMTWYRQAPGKEREWVAAIAS |
| | | | | | | | non-immune) | | NGNQTEYADSVKGRFTISRDNAKNTVYL |
| | | | | | | | | | QMNSLKPEDTAVYYCYVYVGASYIGQG |
| | | | | | | | | | TQVTVSS |
| Sb21 | Nb | SARS-CoV2 | | | | S; RBD | Phage Display | 1086 | QVQLVESGGGLVQAGGSLRLSCAASGF |
| | | | | | | | Library (Nanobody, | | PVKESEMTWYRQARGKEREWVAAINS |
| | | | | | | | non-immune) | | HGMTTHYADSVKGRFTISRDNAKNTVY |
| | | | | | | | | | LQMNSLKPEDTAVYYCYVYVGGSYIGQ |
| | | | | | | | | | GTQVTVSS |
| Sb22 | Nb | SARS-CoV2 | | SARS-CoV2 | | S; RBD | Phage Display | 1087 | QVQLVESGGGLVQAGGSLRLSCAASGF |
| | | | | | | | Library (Nanobody, | | PVNHYEMEWYRQAPGREREWVAAIM |
| | | | | | | | non-immune) | | DSTGYETAYADSVKGRFTISRDNAKNTV |
| | | | | | | | | | YLQMNSLKPEDTAVYYCYVYVGASYIGQ |
| | | | | | | | | | GTQVTVSS |
| Sb23 | Nb | SARS-CoV2 | | SARS-CoV2 | | S; RBD | Phage Display | 1088 | QVQLVESGGGLVQAGGSLRLSCAASGF |
| | | | | | | | Library (Nanobody, | | PVESENMHWYRQAPGKEREWVAAIYS |
| | | | | | | | non-immune) | | TGGWTLYADSVKGRFTISRDNAKNTVYL |
| | | | | | | | | | QMNSLKPEDTAVYYCAVQVGYWYEGQ |
| | | | | | | | | | GTQVTVSS |
| Sb25 | Nb | SARS-CoV2 | | | | S; RBD | Phage Display | 1089 | QVQLVESGGGLVQAGGSLRLSCAASGF |
| | | | | | | | Library (Nanobody, | | PVESTEMTWYRQAPGKEREWVAAIESE |
| | | | | | | | non-immune) | | GHGTEYADSVKGRFTISRDNAKNTVYLQ |
| | | | | | | | | | MNSLKPEDTAVYYCYVYVGAGYIGQGT |
| | | | | | | | | | QVTVSS |
| Sb27 | Nb | SARS-CoV2 | | | | S; RBD | Phage Display | 1090 | QVQLVESGGGLVQAGGSLRLSCAASGF |
| | | | | | | | Library (Nanobody, | | PVKASEMVWYRQAPGKEREWVAAILS |
| | | | | | | | non-immune) | | QGHATEYADSVKGRFTISRDNAKNTVYL |
| | | | | | | | | | QMNSLKPEDTAVYYCYVWVGRSYIGQG |
| | | | | | | | | | TQVTVSS |
| Sb28 | Nb | SARS-CoV2 | | | | S; RBD | Phage Display | 1091 | QVQLVESGGGLVQAGGSLRLSCAASGF |
| | | | | | | | Library (Nanobody, | | PVYSAEMEWYRQAPGKEREWVAAISSY |
| | | | | | | | non-immune) | | GTNTYYADSVKGRFTISRDNAKNTVYLQ |
| | | | | | | | | | MNSLKPEDTAVYYCYVYVGSSYIGQGTQ |
| | | | | | | | | | VTVSS |
| Sb30 | Nb | SARS-CoV2 | | | | S; RBD | Phage Display | 1092 | QVQLVESGGGLVQAGGSLRLSCAASGF |
| | | | | | | | Library (Nanobody, | | PVWYKEMEWYRQAPGKEREWVAAITS |
| | | | | | | | non-immune) | | AGHHTYYADSVKGRFTISRDNAKNTVYL |
| | | | | | | | | | QMNSLKPEDTAVYYCYVYVGESYIGQGT |
| | | | | | | | | | QVTVSS |
| Sb32 | Nb | SARS-CoV2 | | | | S; RBD | Phage Display | 1093 | QVQLVESGGGLVQAGGSLRLSCAASGF |
| | | | | | | | Library (Nanobody, | | PVAHKSMWWYRQAPGKEREWVAAIES |
| | | | | | | | non-immune) | | TGDTTRYADSVKGRFTISRDNAKNTVYL |
| | | | | | | | | | QMNSLKPEDTAVYYCVVWVGEVYRGQ |
| | | | | | | | | | GTQVTVSS |
| Sb37 | Nb | SARS-CoV2 | | | | S; RBD | Phage Display | 1094 | QVQLVESGGGLVQAGGSLRLSCAASGF |
| | | (weak) | | | | | Library (Nanobody, | | PVYNTWMEWYRQAPGKEREWVAAITS |
| | | | | | | | non-immune) | | YGFHTYYADSVKGRFTISRDNAKNTVYL |
| | | | | | | | | | QMNSLKPEDTAVYYCNVKDEGNTTAYY |
| | | | | | | | | | DYWGQGTQVTVSS |
| Sb38 | Nb | SARS-CoV2 | | | | S; RBD | Phage Display | 1095 | QVQLVESGGGLVQAGGSLRLSCAASGF |
| | | | | | | | Library (Nanobody, | | PVYWAHMTWYRQAPGKEREWVAAIV |
| | | | | | | | non-immune) | | SSGAYTAYADSVKGRFTISRDNAKNTVYL |
| | | | | | | | | | QMNSLKPEDTAVYYCNVKDFGTQEHYY |
| | | | | | | | | | DYWGQGTQVTVSS |
| Sb39 | Nb | SARS-CoV2 | | | | S; RBD | Phage Display | 1096 | QVQLVESGGGPVQAGGSLRLSCAASGF |
| | | | | | | | Library (Nanobody, | | PVMWSHMHWYRQAPGKEREWVAAIV |
| | | | | | | | non-immune) | | SYGAYTIYADSVKGRFTISRDNAKNTVYL |
| | | | | | | | | | QMNSLKPEDTAVYYCNVKDFGGYRYYY |
| | | | | | | | | | DYWGQGTQVTVSS |
| Sb40 | Nb | SARS-CoV2 | | | | S; RBD | Phage Display | 1097 | QVQLVESGGGLVQAGGSLRLSCAASGF |
| | | | | | | | Library (Nanobody, | | PVQGTWMEWYRQAPGKEREWVAAIT |
| | | | | | | | non-immune) | | SVGYRTYYADSVKGRFTISRDNAKNTVYL |
| | | | | | | | | | QMNSLKPEDTAVYYCNVKDEGAIAKNY |
| | | | | | | | | | DYWGQGTQVTVSS |
| Sb42 | Nb | SARS-CoV2 | | SARS-CoV2 | | S; RBD | Phage Display | 1098 | QVQLVESGGGLVQAGGSLRLSCAASGF |
| | | | | | | | Library (Nanobody, | | PVYNTWMEWYRQAPGKEREWVAAITS |
| | | | | | | | non-immune) | | WGFKTYYADSVKGRFTISRDNAKNTVYL |
| | | | | | | | | | QMNSLKPEDTAVYYCNVKDEGYTGYYY |
| | | | | | | | | | DYWGQGTQVTVSS |
| Sb43 | Nb | SARS-CoV2 | | SARS-CoV2 | | S; RBD | Phage Display | 1099 | QVQLVESGGGLVQAGGSLRLSCAASGF |
| | | | | | | | Library (Nanobody, | | PVEWTHMHWYRQAPGKEREWVAAIA |
| | | | | | | | non-immune) | | SSGAYTVYADSVKGRFTISRDNAKNTVYL |
| | | | | | | | | | QMNSLKPEDTAVYYCNVKDWGSQDRY |
| | | | | | | | | | YDYWGQGTQVTVSS |
| Sb45 | Nb | SARS-CoV2 | | | | S; RBD | Phage Display | 1100 | QVQLVESGGGLVQAGGSLRLSCAASGF |
| | | | | | | | Library (Nanobody, | | PVAGTWMEWYRQAPGKEREWVAAITS |
| | | | | | | | non-immune) | | YGYRTYYADSVKGRFTISRDNAKNTVYL |
| | | | | | | | | | QMNSLKPEDTAVYYCNVKDEGKSSQVY |
| | | | | | | | | | DYWGQGTQVTVSS |
| Sb46 | Nb | SARS-CoV2 | | SARS-CoV2 | | S; RBD | Phage Display | 1101 | QVQLVESGGGLVQAGGSLRLSCAASGF |
| | | | | | | | Library (Nanobody, | | PVNYTIMFWYRKAPGKEREWVAAIKSH |
| | | | | | | | non-immune) | | GATTLYADSVKGRFTISRDNAKNTVYLQ |
| | | | | | | | | | MNSLKPEDTAVYYCNVKDVGNDQKSYD |
| | | | | | | | | | YWGQGTQVTVSS |
| Sb47 | Nb | SARS-CoV2 | | | | S; RBD | Phage Display | 1102 | QVQLVESGGGLVQAGGSLRLSCAASGF |
| | | | | | | | Library (Nanobody, | | PVVWAHMHWYRQAPGKEREWVAAIT |
| | | | | | | | non-immune) | | SEGAHTIYADSVKGRFTISRDNAKNTVYL |
| | | | | | | | | | QMNSLKPEDTAVYYCNVKDWGTYSTYY |
| | | | | | | | | | DYWGQGTQVTVSS |
| Sb5 | Nb | SARS-CoV2 | | | | S; RBD | Phage Display | 1103 | QVQLVESGGGLVQAGGSLRLSCAASGF |
| | | (weak) | | | | | Library (Nanobody, | | PVAQQEMTWYRQAPGKEREWVAAISS |
| | | | | | | | non-immune) | | IGSITHYADSVKGRFTISRDNAKNTVYLQ |
| | | | | | | | | | MNSLKPEDTAVYYCYVYVGASYIGQGT |
| | | | | | | | | | QVTVSS |
| Sb50 | Nb | SARS-CoV2 | | | | S; RBD | Phage Display | 1104 | QVQLVESGGGLVQAGGSLRLSCAASGF |
| | | | | | | | Library (Nanobody, | | PVQYEHMHWYRQAPGKEREWVAAIVS |
| | | | | | | | non-immune) | | EGAYTHYADSVKGRFTISRDNAKNTVYL |
| | | | | | | | | | QMNSLKPEDTAVYYCNVKDWGWLAQY |
| | | | | | | | | | YDYWGQGTQVTVSS |
| Sb52 | Nb | SARS-CoV2 | | | | S; RBD | Phage Display | 1105 | QVQLVESGGGLVQAGGSLRLSCAASGF |
| | | | | | | | Library (Nanobody, | | PVNYNWMEWYRQAPGKEREWVAAIT |
| | | | | | | | non-immune) | | SWGYKTYYADSVKGRFTISRDNAKNTVY |
| | | | | | | | | | LQMNSLKPEDTAVYYCNVKDEGMWQ |
| | | | | | | | | | HYYDYWGQGTQVTVSS |
| Sb54 | Nb | SARS-CoV2 | | | | S; RBD | Phage Display | 1106 | QVQLVESGGGLVQAGGSLRLSCAASGF |
| | | | | | | | Library (Nanobody, | | PVWNTWMEWYRQAPGKEREWVAAIT |
| | | | | | | | non-immune) | | SYGFKTYYADSVKGRFTISRDNAKNTVYL |
| | | | | | | | | | QMNSLKPEDTAVYYCNVKDEGNSQSHY |
| | | | | | | | | | DYWGQGTQVTVSS |
| Sb56 | Nb | SARS-CoV2 | | | | S; RBD | Phage Display | 1107 | QVQLVESGGGLVQAGGSLRLSCAASGF |
| | | | | | | | Library (Nanobody, | | PVEMWSMEWYRQAPGKEREWVAAI |
| | | | | | | | non-immune) | | MSFGYQTWYADSVKGRFTISRDNAKNT |
| | | | | | | | | | VYLQMNSLKPEDTAVYYCNVKDAGNSK |
| | | | | | | | | | ALYDYWGQGTQVTVSS |
| Sb57 | Nb | SARS-CoV2 | | | | S; RBD | Phage Display | 1108 | QVQLVESGGGLVQAGGSLRLSCAASGF |
| | | | | | | | Library (Nanobody, | | PVEHDHMHWYRQAPGKEREWVAAIVS |
| | | | | | | | non-immune) | | QGAYTVYADSVKGRFTISRDNAKNTVYL |
| | | | | | | | | | QMNSLKPEDTAVYYCNVKDWGRAGAR |
| | | | | | | | | | YDYWGQGTQVTVSS |
| Sb58 | Nb | SARS-CoV2 | | | | S; RBD | Phage Display | 1109 | QVQLVESGGGLVQAGGSLRLSCAASGF |
| | | (weak) | | | | | Library (Nanobody, | | PVDAAWMEWYRQAPGKEREWVAAIT |
| | | | | | | | non-immune) | | SYGYRTYYADSVKGRFTISRDNAKNTVYL |
| | | | | | | | | | QMNSLKPEDTAVYYCNVKDMDRWRTT |
| | | | | | | | | | YDYWGQGTQVTVSS |
| Sb6 | Nb | SARS-CoV2 | | | | S; RBD | Phage Display | 1110 | QVQLVESGGGLVQAGGSLRLSCAASGF |
| | | | | | | | Library (Nanobody, | | PVNHTRMYWYRQAPGKEREWVAAIQS |
| | | | | | | | non-immune) | | HGQNTFYADSVKGRFTISRDNAKNTVYL |
| | | | | | | | | | QMNSLKPEDTAVYYCYVWVGNQYWG |
| | | | | | | | | | QGTQVTVSS |
| Sb60 | Nb | SARS-CoV2 | | | | S; RBD | Phage Display | 1111 | QVQLVESGGGLVQAGGSLRLSCAASGF |
| | | | | | | | Library (Nanobody, | | PVVAWQMTWYRQAPGKEREWVAAIR |
| | | | | | | | non-immune) | | SFGVSTHYADSVKGRFTISRDNAKNTVYL |
| | | | | | | | | | QMNSLKPEDTAVYYCNVKDWGYEYEG |
| | | | | | | | | | YDYWGQGTQVTVSS |
| Sb61 | Nb | SARS-CoV2 | | | | S; RBD | Phage Display | 1112 | QVQLVESGGGLVQAGGSLRLSCAASGF |
| | | | | | | | Library (Nanobody, | | PVQHEWMEWYRQAPGKEREWVAAIT |
| | | | | | | | non-immune) | | SYGYRTYYADSVKGRFTISRDNAKNTVYL |
| | | | | | | | | | QMNSLKPEDTAVYYCNVKDTGTYQAW |
| | | | | | | | | | YDYWGQGTQVTVSS |
| Sb62 | Nb | SARS-CoV2 | | SARS-CoV2 | | S; RBD | Phage Display | 1113 | QVQLVESGGGLVQAGGSLRLSCAASGF |
| | | | | | | | Library (Nanobody, | | PVEQEHMYWYRQASGKEREWVAAIVS |
| | | | | | | | non-immune) | | EGAYTAYADSVKGRFTISRDNAKNTVYL |
| | | | | | | | | | QMNSLKPEDTAVYYCNVKDWGGYQW |
| | | | | | | | | | YYDYWGQGTQVTVSS |
| Sb63 | Nb | SARS-CoV2 | | | | S; RBD | Phage Display | 1114 | QVQLVESGGGLVQAGGSLRLSCAASGF |
| | | | | | | | Library (Nanobody, | | PVNAEIMFWYRQAPGKEREWVAAIKSA |
| | | | | | | | non-immune) | | GTTTLYADSVKGRFTISRDNAKNTVYLQ |
| | | | | | | | | | MNSLKPEDTAVYYCNVKDYGAQAHYYD |
| | | | | | | | | | YWGQGTQVTVSS |
| Sb67 | Nb | SARS-CoV2 | | | | S; RBD | Phage Display | 1115 | QVQLVESGGGLVQAGGSLRLSCAASGF |
| | | | | | | | Library (Nanobody, | | PVMWAHMAWYRQAPGKEREWVAAI |
| | | | | | | | non-immune) | | VSAGAYTHYADSVKGRFTISRDNAKNTV |
| | | | | | | | | | YLQMNSLKPEDTAVYYCNVKDWGTYNS |
| | | | | | | | | | YYDYWGQGTQVTVSS |
| Sb7 | Nb | SARS-CoV2 | | SARS-CoV2 | | S; RBD | Phage Display | 1116 | QVQLVESGGGLVQAGGSLRLSCAASGF |
| | | | | | | | Library (Nanobody, | | PVNAEEMEWYRQAPGKEREWVAAISS |
| | | | | | | | non-immune) | | SGDWTYYADSVKGRFTISRDNAKNTVYL |
| | | | | | | | | | QMNSLKPEDTAVYYCLVYVGSTYIGQGT |
| | | | | | | | | | QVTVSS |
| Sb71 | Nb | SARS-CoV2 | | | | S; RBD | Phage Display | 1117 | QVQLVESGGGSVQAGGSLRLSCAASGN |
| | | | | | | | Library (Nanobody, | | IQHIKYLGWFRQAPGREREGVAALMTR |
| | | | | | | | non-immune) | | YGQTYYADSVKGRFTVSLDNAKNTVYLQ |
| | | | | | | | | | MNSLKPEDTALYYCAAAHYGDNFPLAY |
| | | | | | | | | | QAYLYWGQGTQVTVSS |
| Sb75 | Nb | SARS-CoV2 | | | | S; RBD | Phage Display | 1118 | QVQLVESGGGSVQAGGSLRLSCAASGYI |
| | | | | | | | Library (Nanobody, | | NQIYYLGWFRQAPGKEREGVAALNTYQ |
| | | | | | | | non-immune) | | GQTYYADSVKGRFTVSLDNAKNTVYLQ |
| | | | | | | | | | MNSLKPEDTALYYCAAARWGRDEPLYH |
| | | | | | | | | | YYYSYWGQGTQVTVSS |
| Sb76 | Nb | SARS-CoV2 | | SARS-CoV2 | | S; RBD | Phage Display | 1119 | QVQLVESGGGLVQAGGSLRLSCAASSFP |
| | | | | | | | Library (Nanobody, | | VDTYHMAWYRQAPGKEREWVAAIVS |
| | | | | | | | non-immune) | | WGWRTYYADSVKGRFTISRDNAKNTVY |
| | | | | | | | | | LQMNSLKPEDTAVYYCNVKDIGAQEVH |
| | | | | | | | | | YDYWGQGTQVTVSS |
| Sb78 | Nb | SARS-CoV2 | | | | S; RBD | Phage Display | 1120 | QVQLVESGGGSVQAGGSLRLSCAASGYI |
| | | | | | | | Library (Nanobody, | | KSIKYLGWFRQAPGKEREGVAALMTRY |
| | | | | | | | non-immune) | | GETYYADSVKGRFTVSLDNAKNTVYLQ |
| | | | | | | | | | MNSLKPEDTALYYCAAANYGNNWPLTG |
| | | | | | | | | | VNYWYWGQGTQVTVSS |
| Sb8 | Nb | SARS-CoV2 | | | | S; RBD | Phage Display | 1121 | QVQLVESGGGLVQAGGSLRLSCAASGF |
| | | | | | | | Library (Nanobody, | | PVKSYEMEWYRQAPGKEREWVAAISSY |
| | | | | | | | non-immune) | | GEYTEYADSVKGRFTISRDNAKNTVYLQ |
| | | | | | | | | | MNSLKPEDTAVYYCYVWVGDSYLGQGT |
| | | | | | | | | | QVTVSS |
| Sb83 | Nb | SARS-CoV2 | | | | S; RBD | Phage Display | 1122 | QVQLVESGGGSVQAGGSLRLSCAASGG |
| | | | | | | | Library (Nanobody, | | ITHIVYLGWFRQAPGKEREGVAALMTR |
| | | | | | | | non-immune) | | WGTTYYADSVKGRFTVSLDNAKNTVYL |
| | | | | | | | | | QMNSLKPEDTALYYCAAAKYGQNFPLSY |
| | | | | | | | | | HAYRYWGQGTQVTVSS |
| Sb84 | Nb | SARS-CoV2 | | | | S; RBD | Phage Display | 1123 | QVQLVESGGGSVQAGGSLRLSCAASGYI |
| | | | | | | | Library (Nanobody, | | KHIEYLGWFRQAPGKEREGVAALKTSSG |
| | | | | | | | non-immune) | | STYYADSVKGRFTVSLDNAKNTVYLQM |
| | | | | | | | | | NSLKPEDTALYYCAAARYGRSDPLHYHE |
| | | | | | | | | | YSYWGQGTQVTVSS |
| Sb85 | Nb | SARS-CoV2 | | | | S; RBD | Phage Display | 1124 | QVQLVESGGGSVQAGGSLRLSCAASGSI |
| | | | | | | | Library (Nanobody, | | SSITYLGWFRQAPGKEREGVAALVTSRG |
| | | | | | | | non-immune) | | KTYYADSVKGRFTVSLDNAKNTVYLQM |
| | | | | | | | | | NSLKPEDTALYYCAAASWGYTWPLYTYD |
| | | | | | | | | | YWYWGQGTQVTVSS |
| Sb88 | Nb | SARS-CoV2 | | | | S; RBD | Phage Display | 1125 | QVQLVESGGGLVQAGGSLRLSCAASGF |
| | | | | | | | Library (Nanobody, | | PVWAHHMLWYRQAPGKEREWVAAIA |
| | | | | | | | non-immune) | | SWGANTAYADSVKGRFTISRDNAKNTV |
| | | | | | | | | | YLQMNSLKPEDTAVYYCNVKDSGQYRE |
| | | | | | | | | | NYDYWGQGTQVTVSS |
| Sb9 | Nb | SARS-CoV2 | | | | S; RBD | Phage Display | 1126 | QVQLVESGGGLVQAGGSLRLSCAASGF |
| | | | | | | | Library (Nanobody, | | PVGQQHMYWYRQAPGKEREWVAAIYS |
| | | | | | | | non-immune) | | YGHITKYADSVKGRFTISRDNAKNTVYLQ |
| | | | | | | | | | MNSLKPEDTAVYYCWVYVGDYYEGQG |
| | | | | | | | | | TQVTVSS |
| Sb90 | Nb | SARS-CoV2 | | | | S; RBD | Phage Display | 1127 | QVQLVESGGGSVQAGGSLRLSCAASGA |
| | | | | | | | Library (Nanobody, | | INQIYYLGWFRQAPGKEREGVAALSTKY |
| | | | | | | | non-immune) | | GETYYADSVKGRFTVSLDNAKNTVYLQ |
| | | | | | | | | | MNSLKPEDTALYYCAAARWGRQYPLTF |
| | | | | | | | | | VYYSYWGQGTQVTVSS |
| Sb93 | Nb | SARS-CoV2 | | | | S; RBD | Phage Display | 1128 | QVQLVESGGGSVQAGGSLRLSCAASGH |
| | | | | | | | Library (Nanobody, | | IAQIEYLGWFRQAPGKEREGVAALSTNQ |
| | | | | | | | non-immune) | | GYTYYADSVKGRFTVSLDNAKNTVYLQ |
| | | | | | | | | | MNSLKPEDTALYYCAAARWGRTYPLSY |
| | | | | | | | | | MAYTYWGQGTQVTVSS |
| Sb94 | Nb | SARS-CoV2 | | | | S; RBD | Phage Display | 1129 | QVQLVESGGGSVQAGGSLRLSCAASGYI |
| | | | | | | | Library (Nanobody, | | TMIEYLGWFRQAPGKEREGVAALNTHT |
| | | | | | | | non-immune) | | GGTYYADSVKGRFTVSLDNAKNTVYLQ |
| | | | | | | | | | MNSLKPEDTALYYCAAARWGRYEPLHY |
| | | | | | | | | | AYYSYWGQGTQVTVSS |
| Sb95 | Nb | SARS-CoV2 | | | | S; RBD | Phage Display | 1130 | QVQLVESGGGSVQAGGSLRLSCAASGN |
| | | | | | | | Library (Nanobody, | | IYNIKYLGWFRQAPGKEREGVAALMTRY |
| | | | | | | | non-immune) | | GETYYADSVKGRFTVSLDNAKNTVYLQ |
| | | | | | | | | | MNSLKPEDTALYYCAAASYGANWPLVS |
| | | | | | | | | | AAYTYWGQGTQVTVSS |
| Sb97 | Nb | SARS-CoV2 | | | | S; RBD | Phage Display | 1131 | QVQLVESGGGSVQAGGSLRLSCAASGA |
| | | | | | | | Library (Nanobody, | | ISTIEYLGWFRQAPGREREGVAALYTER |
| | | | | | | | non-immune) | | GYTYYADSVKGRFTVSLDNAKNTVYLQ |
| | | | | | | | | | MNSLKPEDTALYYCAAARYGHAQAPLH |
| | | | | | | | | | YFWYGYWGQGTQVTVSS |
| SR1 | Nb | SARS-CoV2 | | | | S; RBD | Phage Display | 1132 | QVQLVESGGGLVQAGGSLRLSCAASGF |
| | | | | | | | Library (Nanobody, | | PVAAYEMEWYRQAPGKEREWVAAINS |
| | | | | | | | non-immune) | | MGDQTYYADSVKGRFTISRDNAKNTVY |
| | | | | | | | | | LQMNSLKPEDTAVYYCYVYVGFSYIGQG |
| | | | | | | | | | TQVTVSS |
| SR13 | Nb | SARS-CoV2 | | | | S; RBD | Phage Display | 1133 | QVQLVESGGGLVQAGGSLRLSCAASGF |
| | | | | | | | Library (Nanobody, | | PVDYMEMEWFRQAPGKEREWVAAITS |
| | | | | | | | non-immune) | | NGRETYYADSVKGRFTVSRDNAKNTVYL |
| | | | | | | | | | QMNSLKPEDTAVYYCYVYVGSSYIGQGT |
| | | | | | | | | | QVTVSS |
| SR18 | Nb | SARS-CoV2 | | | | S; RBD | Phage Display | 1134 | QVQLVESGGGLVQAGGSLRLSCAASGF |
| | | | | | | | Library (Nanobody, | | PVWFQEMEWYRQAPGKEREWVAAISS |
| | | | | | | | non-immune) | | QGTHTYYADSVKGRFTISRDNAKNTVYL |
| | | | | | | | | | QMNSLKPEDTAVYYCYVYVGASYLGQG |
| | | | | | | | | | TQVTVSS |
| SR31 | Nb | SARS-CoV2 | | | | S; RBD | Phage Display | 1135 | QVQLVESGGGLVQAGGSLRLSCAASGF |
| | | | | | | | Library (Nanobody, | | PVWQGEMAWYRQAPGKEREWVAAIS |
| | | | | | | | non-immune) | | SMGYKTYYADSVKGRFTISRDNAKNTVY |
| | | | | | | | | | LQMNSLKPEDTAVYYCAVMVGFWYAG |
| | | | | | | | | | QGTQVTVSS |
| SR34 | Nb | SARS-CoV2 | | | | S; RBD | Phage Display | 1136 | QVQLVESGGGLVQAGGSLRLSCAAGGF |
| | | | | | | | Library (Nanobody, | | PVKDHEMEWYRQAPGKEREWVAAITS |
| | | | | | | | non-immune) | | SGWGTNTYYADSVKGRFTISRDNAKNT |
| | | | | | | | | | VYLQMNSLKPEDTAVYYCYVYVGSSYIG |
| | | | | | | | | | QGTQVTVSS |
| SR38 | Nb | SARS-CoV2 | | | | S; RBD | Phage Display | 1137 | QVQLVESGGGLVQAGGSLRLSCAASGF |
| | | | | | | | Library (Nanobody, | | PVNQEEMEWYRQAPGKEREWVAAIKS |
| | | | | | | | non-immune) | | WGTLTAYADSVKGRFTISRDNAKNTVYL |
| | | | | | | | | | QMNSLKPEDTAVYYCAVHVGQTYIGQG |
| | | | | | | | | | TQVTVSS |
| SR4 | Nb | SARS-CoV2 | | | | S; RBD | Phage Display | 1138 | QVQLVESGGGLVQAGGSLRLSCAASGF |
| | | | | | | | Library (Nanobody, | | PVYSWNMWWYRQAPGKEREWVAAIE |
| | | | | | | | non-immune) | | SHGDSTRYADSVKGRFTISRDNAKNTVY |
| | | | | | | | | | LQMNSLKPEDTAVYYCYVWVGHTYYG |
| | | | | | | | | | QGTQVTVSS |
| SR5 | Nb | SARS-CoV2 | | | | S; RBD | Phage Display | 1139 | QVQLVESGGGLVQAGGSLRLRCAASGF |
| | | | | | | | Library (Nanobody, | | PVETTEMEWYRQAPGKEREWVAAISSY |
| | | | | | | | non-immune) | | GSETYYADSVKGRFTISRDNAKNTVYLQ |
| | | | | | | | | | MNSLKPEDTAVYYCYVYVGTSYLGQGT |
| | | | | | | | | | QVTVSS |
| SR7 | Nb | SARS-CoV2 | | | | S; RBD | Phage Display | 1140 | QVQLVESGGGLVQAGGSLRLSCAASGF |
| | | | | | | | Library (Nanobody, | | PVWSNEMEWYRQAPGKEREWVAAITS |
| | | | | | | | non-immune) | | YGTTEYADSVKGRFTISRDNAKNTVYLQ |
| | | | | | | | | | MNSLKPEDTAVYYCYVYVGYSYIGQGTQ |
| | | | | | | | | | VTVSS |
| Ty1 | Nb | SARS-CoV2 | | SARS-CoV2 | | S; RBD | Immunised Alpaca | 1141 | QVQLVETGGGLVQPGGSLRLSCAASGF |
| | | | | | | | | | TFSSVYMNWVRQAPGKGPEWVSRISP |
| | | | | | | | | | NSGNIGYTDSVKGRFTISRDNAKNTLYL |
| | | | | | | | | | QMNNLKPEDTALYYCAIGLNLSSSSVRG |
| | | | | | | | | | QGTQVTVSS |
| VH-Fc- | Nb | SARS-CoV2 | | SARS-CoV2 | | S; RBD | Phage Display | | ND |
| B01 | | | | | | | (Human) | | |
| VH2-A01- | Nb | SARS-CoV2 | | SARS-CoV2 | | S; RBD | Phage Display | | ND |
| B01 | | | | | | | (Human) | | |
| VH2-A01- | Nb | SARS-CoV2 | | SARS-CoV2 | | S; RBD | Phage Display | | ND |
| B02 | | | | | | | (Human) | | |
| VH3-B01 | Nb | SARS-CoV2 | | SARS-CoV2 | | S; RBD | Phage Display | | ND |
| | | | | | | | (Human) | | |
| VHH-72 | Nb | SARS-CoV1, | | SARS-CoV2 | | S; RBD | Immunised Llama | 1142 | QVQLQESGGGLVQAGGSLRLSCAASGR |
| | | SARS-CoV2 | | and SARS- | | | | | TFSEYAMGWFRQAPGKEREFVATISWS |
| | | | | CoV1 | | | | | GGSTYYTDSVKGRFTISRDNAKNTVYLQ |
| | | | | | | | | | MNSLKPDDTAVYYCAAAGLGTVVSEW |
| | | | | | | | | | DYDYDYWGQGTQVTVSS |
| W23UACh | Nb | SARS-CoV2 | | | | S; RBD | Immunised Alpaca | 1143 | QVQLVESGGGLVQPGESLRLSCAASGNI |
| | | | | | | | | | FGIAAVHWFRKAPGKEREFTAGFGSDG |
| | | | | | | | | | STNYANSVKGRFTISRDNAKNTTYLQMN |
| | | | | | | | | | SLKPEDTAVYYCHALIKNELGFLDYWGP |
| | | | | | | | | | GTQVTVSS |
| W25UACh | Nb | SARS-CoV2 | | | | S; RBD | Immunised Alpaca | 1144 | QVQLVESGGGLVQPGESLRLSCAASGSI |
| | | | | | | | | | FGIYAVHWFRMAPGKEREFTAGFGSHG |
| | | | | | | | | | STNYAASVKGRFTMSRDNAKNTTYLQM |
| | | | | | | | | | NSLKPADTAVYYCHALIKNELGFLDYWG |
| | | | | | | | | | PGTQVTVSS |
| | | SEQ | | | | | | SEQ | |
| | | ID | | Heavy V | Heavy J | Light V | Light J | ID | |
| | Name | NO.: | VL | Gene | Gene | Gene | Gene | NO.: | CDRH3 |
| | 0304-2F8 | 1145 | EIVMTQSHTLLPVTPGEPASITCRSSQS | IGHV5-51 | IGHJ6 | IGKV2-28 | IGKJ3 | 2057 | ARRGDGLYYY |
| | | | LLHSNGYNYLDWYLQKPGQSPQLLIYL | (Human) | (Human) | (Human) | (Human) | | GMDV |
| | | | GSNRASGVPDRFSGSGSGTDFTLKISR | | | | | | |
| | | | VEAEDVGVYYCMQALQTPQTFGQGT | | | | | | |
| | | | KVDIK | | | | | | |
| | 0304-3H3 | 1146 | DIVMTQSPATLSVSPEERATLSCRASQ | IGHV4-59 | IGHJ2 | IGKV3-15 | IGKJ1 | 2058 | ARDRIAPVGK |
| | | | SVSSNLAWYQQKPGQAPRLLIYGAST | (Human) | (Human) | (Human) | (Human) | | FFGWYFDL |
| | | | RATGIPARFSGSGSGTEFTLTISSLQSE | | | | | | |
| | | | DFAVYYCQQYNKWPPWTFGQGTKV | | | | | | |
| | | | DIK | | | | | | |
| | 0304- | 1147 | EIVLTQSPDSLAVSLGERATINCRSSQS | IGHV3-64 | IGHJ4 | IGKV4-1 | IGKJ3 | 2059 | ARSSSRGFDY |
| | 4A10 | | VLYSSNNKNYLAWYQQKPGQPPKVLI | (Human) | (Human) | (Human) | (Human) | | |
| | | | YWASTRESGVPDRFSGSGSGTDFTLTI | | | | | | |
| | | | SSLQAEDVAVYYCQQYYSSPYAFGPGT | | | | | | |
| | | | KVDIK | | | | | | |
| | 0304-4A2 | 1148 | EIVLTQSPDSLAVSLGERATINCKSSQS | IGHV4-39 | IGHJ4 | IGKV4-1 | IGKJ1 | 2060 | ARELFTAVAG |
| | | | VLYSSNNKNYLAWYQQKPGQPPKLLI | (Human) | (Human) | (Human) | (Human) | | KGGIDY |
| | | | YWASTRESGVPDRFSGSGSGTDFTLTI | | | | | | |
| | | | SSLQAEDVAVYYCHQYYNTPRTFGQG | | | | | | |
| | | | TKVEIK | | | | | | |
| | 0317-A1 | 1149 | DIVMTQSPATLSLSPGERATLSCRASQ | IGHV3-30 | IGHJ6 | IGKV3-11 | IGKJ3 | 2061 | AKDFKGGSSS |
| | | | SVSSYLAWYQQKPGQAPRLLIYDASN | (Human) | (Human) | (Human) | (Human) | | WYTPEIEYG |
| | | | RATGIPARFSGSGSGADFTLTISSLEPE | | | | | | MDV |
| | | | DFAVYYCRQRSNWPPTFGGGTKVDIK | | | | | | |
| | 0317-A2 | 1150 | DIVMTQSPSSLSASVGDRVTITCRASQ | IGHV7-4- | IGHJ6 | IGKV1-39 | IGKJ3 | 2062 | ARLIRHEAHT |
| | | | SISSYLNWYQQEPGKAPKLLIYAASSLQ | 1 | (Human) | (Human) | (Human) | | YCSGGSCYSP |
| | | | SGVPSRFSGSGSGTDFTLTISSLQPEDF | (Human) | | | | | DYYYGMDV |
| | | | ATYYCQQSYSTPPTFGQGTKVDIK | | | | | | |
| | 0317-A3 | 1151 | DIQMTHSLILLSASVGDRVTITCRASQS | IGHV3-48 | IGHJ3 | IGKV1-39 | IGKJ1 | 2063 | ASNPPLGEPY |
| | | | ISSYLNWYQQKPGKAPKLLIYAASSLQS | (Human) | (Human) | (Human) | (Human) | | FDI |
| | | | GVPSRFSGSGSGADFTLTISSLQPEDFA | | | | | | |
| | | | TYYCQQTYRPPWTFGQGTKVDIK | | | | | | |
| | 0317-A7 | 1152 | EIVVTQSLLSLPVTPGEPASISCRSSQS | IGHV3- | IGHJ6 | IGKV2-28 | IGKJ1 | 2064 | ARWGGGMQ |
| | | | LLHSNGYNYLDWYLQKPGQSPQVLIYL | 303 | (Human) | (Human) | (Human) | | YLDV |
| | | | GSNRASGVPDRFSGSGSGTDFTLKISR | (Human) | | | | | |
| | | | VEAEDVGVYYCMQTLQTPYTFGQGTK | | | | | | |
| | | | VEIK | | | | | | |
| | 0317-A8 | 1153 | DIQMTQSPSSLSASVGDRVTITCQASQ | IGHV7-4- | IGHJ4 | IGKV1-33 | IGKJ4 | 2065 | ARAGPNYDF |
| | | | DISNYLNWYQQKPGKAPKLLIYDASNL | 1 | (Human) | (Human) | (Human) | | WSGYYQTFD |
| | | | ETGVPSRFSGSGSGTDFTFTISSLQPED | (Human) | | | | | Y |
| | | | IATYYCQQYDNLPLTFGGGTKVEIK | | | | | | |
| | 0317-A9 | 1154 | EIVMTQSPLSSPVTLGQPASISCRSSQS | IGHV1-24 | IGHJ6 | IGKV2-24 | IGKJ3 | 2066 | ATATAMDGY |
| | | | LVHSDGNTYLSWLQQRPGQPPRLLIY | (Human) | (Human) | (Human) | (Human) | | YYYYGMDV |
| | | | KISNRFSGVPDRFSGSGAGTDFTLKISR | | | | | | |
| | | | VEAEDVGVYYCMQATQFPYTFGQGT | | | | | | |
| | | | KVDIK | | | | | | |
| | 0317-B1 | 1155 | DIVMTHSLRLLAVSLGERATINCKSSQS | IGHV5-51 | IGHJ3 | IGKV4-1 | IGKJ3 | 2067 | ASAGSSWYG |
| | | | VLYSSNNKNYLAWYQQKPGQPPKLLI | (Human) | (Human) | (Human) | (Human) | | DAFDI |
| | | | YWASTRESGVPDRFSGSGSGTDFTLTI | | | | | | |
| | | | SSLQAEDVAVYYCQQYYSTYGSFGGG | | | | | | |
| | | | TKVDIK | | | | | | |
| | 0317-C4 | 1156 | QAVVTQPPSVSAAPGQKVTISCSGSSS | IGHV1-24 | IGHJ5 | IGLV1-51 | IGU3 | 2068 | ATATIFGVAN |
| | | | NIGNNYVSWYQQLPGTAPKLLIYDNN | (Human) | (Human) | (Human) | (Human) | | NWFDP |
| | | | KRPSGIPDRFSGSKSGTSATLGITGLQT | | | | | | |
| | | | GDEADYYCGTWDSSLSVVVFGGGTKL | | | | | | |
| | | | TVL | | | | | | |
| | 0317-C9 | 1157 | QAVVTQPPSASGTPGQRVTISCSGSSS | IGHV3-30 | IGHJ6 | IGLV1-44 | IGU3 | 2069 | AKDLGYYDILT |
| | | | NIGSNTVNWYQQLPGTAPKLLIYSNN | (Human) | (Human) | (Human) | (Human) | | GQLGGYYYYY |
| | | | QRPSGVPDRFSGSKSGTSASLAISGLQ | | | | | | GMDV |
| | | | SEDEADYYCAAWDDSLNGVVFGGGT | | | | | | |
| | | | KLTVL | | | | | | |
| | 10C10 | 1158 | DIQLTQSPSSLSASVRNRVTITCRASQG | IGHV3-7 | IGHJ3 | IGKV1-17 | IGKJ4 | 2070 | ARDWDYDILT |
| | | | IKNDLCWYQQKPGKAPKRLIYAASSLQ | (Human) | (Human) | (Human) | (Human) | | GSWFGAFDI |
| | | | SGVPSRFSGSGSGTEFTLTISSLQPEDF | | | | | | |
| | | | ATYYCLQHNNYPLTFGGGTNEEIK | | | | | | |
| | 1A09 | 1159 | QAVVTQESALTTSPGETVTLTCRSSTG | IGHV2-9- | IGHJ4 | IGLV1 | IGU1 | 2071 | ARKDYYYGSS |
| | | | AVTTSNYANWVQEKPDHLFTGLIGGT | 1 | (Mouse) | (Mouse) | (Mouse) | | YAMDY |
| | | | NNRAPGVPARFSGSLIGDKAALTITGA | (Mouse) | | | | | |
| | | | QTEDEAIYFCALWYSNHWVFGGGTKL | | | | | | |
| | | | TVL | | | | | | |
| | 1A10 | 1160 | DIQMTQSPSSLSASLGDRVTISCRASQ | IGHV1-76 | IGHJ2 | IGKV10-96 | IGKJ2 | 2072 | ARDYGSSYVD |
| | | | DISNYLNWYQQKPDGTVKLLIFYTSRL | (Mouse) | (Mouse) | (Mouse) | (Mouse) | | YFDY |
| | | | HSGVPSRFSGSGSGTDYSLTISNLEQE | | | | | | |
| | | | DIATYFCQQGNTLPYTFGGGTKLEIK | | | | | | |
| | 1A12 | 1161 | DIKMTQSPSSMYASLGERVTITCKASQ | IGHV14-4 | IGHJ4 | IGKV14- | IGKJ1 | 2073 | STGGYGNYV |
| | | | DINSFLSWFQQKPGKSPKTLIYRANRL | (Mouse) | (Mouse) | 111 | (Mouse) | | DAMDY |
| | | | VDGVPSRFSGSGSGQDYSLTISSLDYE | | | (Mouse) | | | |
| | | | DMGIYYCLQYDEFRTFGGGTKLEIK | | | | | | |
| | 1B07 | 1162 | QAVVTQESALTTSPGETVTLTCRSSTG | IGHV2-9- | IGHJ4 | IGLV1 | IGU3 | 2074 | ARKDYYGSSS |
| | | | AVTTSNYANWVQEKPDHLITGLIGGT | 1 | (Mouse) | (Mouse) | (Mouse) | | NVMDY |
| | | | NNRVPGVPARFSGSLIGDKAALTITGA | (Mouse) | | | | | |
| | | | QTEDEAIYFCALWYSNQFIFGSGTKVT | | | | | | |
| | | | VL | | | | | | |
| | 1610 | 1163 | QAVVTQESALTTSPGETVTLTCRSSTG | IGHV2-9- | IGHJ4 | IGLV1 | IGU1 | 2075 | ARKDYYGSSL |
| | | | AVTTSNYANWVQEKPDHLFTGLIGGT | 1 | (Mouse) | (Mouse) | (Mouse) | | AMDY |
| | | | NNRAPGVPARFSGSLIGDKAALTITGA | (Mouse) | | | | | |
| | | | QTEDEAIYFCALWYSNHWVFGGGTKL | | | | | | |
| | | | TVL | | | | | | |
| | 1C05 | 1164 | DIVLTQSPASLAVSLGQRATISCRASES | IGHV1-42 | IGHJ4 | IGKV3-10 | IGKJ5 | 2076 | ARRNYDLYYY |
| | | | VDSYGTSFMHWYQQKPGQPPKLLIYL | (Mouse) | (Mouse) | (Mouse) | (Mouse) | | AMDY |
| | | | ASNLESGVPARFSGSGSRTDFTLTIDPV | | | | | | |
| | | | EADDAATYYCQQNNEDPLTFGAGTKL | | | | | | |
| | | | ELK | | | | | | |
| | 1C06 | 1165 | DVVMTQTPLSLPVSLGDQASISCRSSQ | IGHV1-7 | IGHJ4 | IGKV1-117 | IGKJ1 | 2077 | ARSDYYGSSY |
| | | | SIVHSNGNTYLEWYLQKPGQSPKLLIY | (Mouse) | (Mouse) | (Mouse) | (Mouse) | | VGYAMDY |
| | | | KVSNRFSGVPDRFSGSGSGTDFTLKIS | | | | | | |
| | | | RVEAEDLGVYYCFQGSHVPPTFGGGT | | | | | | |
| | | | KLEIK | | | | | | |
| | 1C07 | 1166 | DIVLTQSPASLAVSLGQRATISCRASEG | IGHV1-42 | IGHJ4 | IGKV3-10 | IGKJ5 | 2078 | ARRNYDLYYY |
| | | | VDSYGSSFMHWYQQKPGQPPKLLIYL | (Mouse) | (Mouse) | (Mouse) | (Mouse) | | AMDY |
| | | | ASNLESGVPARFSGSGSGTDFTLTIDP | | | | | | |
| | | | VEADDAATYYCQQNNEDPLTFGAGTK | | | | | | |
| | | | LELK | | | | | | |
| | 1D04 | 1167 | DIKMTQSPSSMYASLGERVTITCKASQ | IGHV14-4 | IGHJ4 | IGKV14- | IGKJ1 | 2079 | STGGYGNYV |
| | | | DINSFLSWFQQKPGKSPKTLIYRANRL | (Mouse) | (Mouse) | 111 | (Mouse) | | DAMDY |
| | | | VDGVPSRFSGSGSGQDYSLTISSLEYED | | | (Mouse) | | | |
| | | | MGIYYCLQYDEFRTFGGGTKLEIK | | | | | | |
| | 1D05 | 1168 | QAVVTQESALTTSPGETVTLTCRSSTG | IGHV2-9- | IGHJ4 | IGLV1 | IGU3 | 2080 | ARKDYYGSSS |
| | | | AVTTSNYANWVQEKPDHLITGLIGGT | 1 | (Mouse) | (Mouse) | (Mouse) | | NVMDY |
| | | | NNRVPGVPARFSGSLIGDKAALTITGA | (Mouse) | | | | | |
| | | | QTEDKAIYFCALWYSNQFIFGSGTKVT | | | | | | |
| | | | VL | | | | | | |
| | 1E02 | 1169 | DIVLTQSPASLAVSLGQRATISCRASEG | IGHV1-42 | IGHJ4 | IGKV3-10 | IGKJ5 | 2081 | SRRNYDLYYY |
| | | | VDSYGSSFMHWYQQKPGQAPKLLIYL | (Mouse) | (Mouse) | (Mouse) | (Mouse) | | AMDY |
| | | | ASNLESGVPARFSGSGSRTDFTLTIDPV | | | | | | |
| | | | EADDAAIYYCQQNNEDPLTFGAGTKL | | | | | | |
| | | | EIK | | | | | | |
| | 1E07 | 1170 | DIVLTQSPASLAVSLGQRATISCRASES | IGHV1-42 | IGHJ3 | IGKV3-1 | IGKJ1 | 2082 | ARGAGAY |
| | | | VEYYGTSLMQWFQQKPGQPPKLLIFA | (Mouse) | (Mouse) | (Mouse) | (Mouse) | | |
| | | | ASNVESGVPARFGGSGSGTDFSLNIHP | | | | | | |
| | | | VEEDDIAMYFCQQSRKVPWTFGGGT | | | | | | |
| | | | KLEIK | | | | | | |
| | 1E10 | 1171 | QIVLTQSPAIMSASPGEKVTMTCSASS | IGHV1-82 | IGHJ3 | IGKV4-59 | IGKJ2 | 2083 | ARDHGPA |
| | | | SVSYMHWYQQKSGTSPKRWIYDTSKL | (Mouse) | (Mouse) | (Mouse) | (Mouse) | | |
| | | | ASGVPARFSGSGSGTSYSLTISSMEAE | | | | | | |
| | | | DAATYYCQQWSSNPPTFGSGTKLEIK | | | | | | |
| | 1H06 | 1172 | DIVLTQSPASLAVSLGQRATISCRASES | IGHV1-42 | IGHJ3 | IGKV3-1 | IGKJ1 | 2084 | ARGAGAY |
| | | | VEYYGTSLMQWFQQKPGQPPKLLIFA | (Mouse) | (Mouse) | (Mouse) | (Mouse) | | |
| | | | ASNVESGVPARFGGSGSGTDFSLNIHP | | | | | | |
| | | | VEEDDIATYFCQQSRKVPWTFGGGTK | | | | | | |
| | | | LEIK | | | | | | |
| | 1H10 | 1173 | QAVVTQESALTTSPGETVTLTCRSSTG | IGHV2-9- | IGHJ2 | IGLV1 | IGU1 | 2085 | ARISYYDYEG |
| | | | AVTTSNYANWVQEKPDHLFTGLIGGT | 1 | (Mouse) | (Mouse) | (Mouse) | | VDY |
| | | | NNRAPGVPARFSGSLIGDKAALTITGA | (Mouse) | | | | | |
| | | | QTEDEAIYFCALWYSNHWVFGGGTKL | | | | | | |
| | | | TVL | | | | | | |
| | 1M-1D2 | 1174 | QAVVTQPPSASGTPGQRVTISCSGSSS | IGHV3-64 | IGHJ4 | IGLV1-47 | IGU3 | 2086 | ARGAEYYDF |
| | | | NIGSNYVYWYQQLPGTAPKLLIYNNN | (Human) | (Human) | (Human) | (Human) | | WSGYYSAYFD |
| | | | QRPSGVPDRFSGSKSGTSASLAISGLRS | | | | | | Y |
| | | | EDEADYYCAAWDDSLIYVLFGGGTKLT | | | | | | |
| | | | VL | | | | | | |
| | 2B04 | 1175 | QAVVTQESALTTSPGETVTLTCRSSTG | IGHV2-9- | IGHJ4 | IGLV1 | IGU1 | 2087 | ARKDYYGRYY |
| | | | AVTTSNYANWVQEKPDHLFTGLIGGT | 1 | (Mouse) | (Mouse) | (Mouse) | | GMDY |
| | | | NNRAPGVPARFSGSLIGDKAALTITGA | (Mouse) | | | | | |
| | | | QTEDEAIYFCALWYNNHWVFGGGTK | | | | | | |
| | | | LTVL | | | | | | |
| | 2C02 | 1176 | QIVLTQSPAIMSASPGEKVTMTCSASS | IGHV1-74 | IGHJ1 | IGKV4-55 | IGKJ5 | 2088 | AILDSYWYFD |
| | | | SVSYMYWYQQKPGSSPRLLIYDTSNLA | (Mouse) | (Mouse) | (Mouse) | (Mouse) | | V |
| | | | SGVPIRFSGSGSGTSYSLTISRMEAEDA | | | | | | |
| | | | ATYYCQQWSSYPLTFGAGTKLELK | | | | | | |
| | 2C03 | 1177 | DVVMTQTPLSLPVSLGDQASISCRSSQ | IGHV1-82 | IGHJ1 | IGKV1-117 | IGKJ2 | 2089 | ARKSYGYWH |
| | | | SIVYSNGNTYLEWYLQKPGQSPKLLIYK | (Mouse) | (Mouse) | (Mouse) | (Mouse) | | FDV |
| | | | VSNRFSGVPDRFSGSGSGTDFTLKISG | | | | | | |
| | | | VEAEDLGVYYCFQGSHVPYTFGGGTK | | | | | | |
| | | | LEIK | | | | | | |
| | 2C04 | 1178 | DIVLTQSQASLAVSLGQRATISCRASES | IGHV1-26 | IGHJ2 | IGKV3-1 | IGKJ1 | 2090 | AAGKGDY |
| | | | VEYYGTSLMQWYQQKPGQPPKLLIYA | (Mouse) | (Mouse) | (Mouse) | (Mouse) | | |
| | | | ASNVESGVPARFSGSGSGTDFSLNIHP | | | | | | |
| | | | VEEDDIAMYFCQQSRKVPWTFGGGT | | | | | | |
| | | | KLEIK | | | | | | |
| | 2D01 | 1179 | QIVLTQSPAIMSASPGEKVTMTCSASS | IGHV1-74 | IGHJ1 | IGKV4-55 | IGKJ5 | 2091 | AILDSYWYFD |
| | | | SVSYMYWYQQKPGSSPRLLIYDTSNLA | (Mouse) | (Mouse) | (Mouse) | (Mouse) | | V |
| | | | SGVPIRFSGSGSGTSYSLTISRMEAEDA | | | | | | |
| | | | ATYYCQQWSSYPLTFGAGTKLELK | | | | | | |
| | 2D08 | 1180 | DIVLTQSQASLAVSLGQRATISCRASES | IGHV1-26 | IGHJ2 | IGKV3-1 | IGKJ1 | 2092 | AAGKGDY |
| | | | VEYYGTSLMQWYQQKPGQPPKLLIYA | (Mouse) | (Mouse) | (Mouse) | (Mouse) | | |
| | | | ASNVESGVPARFSGSGSGTDFSLNIHP | | | | | | |
| | | | VEEDDIAMYFCQQSRKVPWTFGGGT | | | | | | |
| | | | KLEIK | | | | | | |
| | 2D11 | 1181 | DIVLTQSPASLAVSLGQRATISCRASES | IGHV1-26 | IGHJ3 | IGKV3-2 | IGKJ1 | 2093 | ARKGDGYYG |
| | | | VDNYGISFMNWFQQKPGQPPKLLIYA | (Mouse) | (Mouse) | (Mouse) | (Mouse) | | GFAY |
| | | | ASNQGSGVPARFSGSGSGTDFSLNIHP | | | | | | |
| | | | MEEDDTAMYFFQQSKEVPWTFGGGT | | | | | | |
| | | | KLEIK | | | | | | |
| | 2E06 | 1182 | DIVLTQSPASLTVSLGQRATISCKASQS | IGHV14-3 | IGHJ4 | IGKV3-4 | IGKJ2 | 2094 | ATYGSYYLYYY |
| | | | VDYGGDRYMNWYQQKPGQPPKLLIF | (Mouse) | (Mouse) | (Mouse) | (Mouse) | | AMNY |
| | | | AASNLESGIPARFSGSGSGTDFTLNIHP | | | | | | |
| | | | VEEEDAATYYCQQSNEDPYTFGGGTK | | | | | | |
| | | | LEIK | | | | | | |
| | 2E10 | 1183 | DIVLTQSPASLAVSLGQRATMSCRASE | IGHV1-76 | IGHJ4 | IGKV3-4 | IGKJ5 | 2095 | ARYDGNLYYY |
| | | | SVDSYGNGFMHWYQQKPGQPPKLLI | (Mouse) | (Mouse) | (Mouse) | (Mouse) | | AMDY |
| | | | YLASNLESGVPARFSGSGSRTDFSLTID | | | | | | |
| | | | PVEADDAAIYYCQQNNEDPLTFGAGT | | | | | | |
| | | | KLELK | | | | | | |
| | 2F04 | 1184 | DIVLTQSPAILSVSPGERVSFSCRASQN | IGHV1-55 | IGHJ2 | IGKV5-48 | IGKJ5 | 2096 | ARWDFYGSR |
| | | | IGTIIHWYQQRTNGSPRLLIKYASESVS | (Mouse) | (Mouse) | (Mouse) | (Mouse) | | TFDY |
| | | | GIPSRFSGSGSGTDFTLSINSVESEDIA | | | | | | |
| | | | DYYCQQSSSWPLTFGAGTKLELK | | | | | | |
| | 2H04 | 1185 | DIVLTQSPAILSVSPGERVSFSCRASQN | IGKV5-48 | IGKJ5 | IGHV1-55 | IGHJ2 | 2097 | ARWDFYGSR |
| | | | IGTIIHWYQQRTNGSPRLLIKYASESVS | (Mouse) | (Mouse) | (Mouse) | (Mouse) | | TFDY |
| | | | GIPSRFSGSGSGTDFTLSINSVESEDIA | | | | | | |
| | | | DYYCQQSSSWPLTFGAGTKLELK | | | | | | |
| | 2M- | 1186 | QSALTQPHSVSESPGKTVTISCTGSSGS | IGHV3-66 | IGHJ6 | IGLV6-57 | IGU3 | 2098 | ARATWLRGV |
| | 10B11 | | IASNYVQWYQQRPGSAPTTVIYEDNQ | (Human) | (Human) | (Human) | (Human) | | MDVW |
| | | | RPSGVPDRFSGSIDSSSNSASLTISGLK | | | | | | |
| | | | TEDEADYYCQSYDSSNHWVFGGGTKLT | | | | | | |
| | | | VL | | | | | | |
| | 2M-12D7 | 1187 | AIRMTQSPSSLSASVGDRVTITCRASQ | IGHV3-9 | IGHJ3 | IGKV1-39 | IGKJ3 | 2099 | AKDVRYCSST |
| | | | SITGYLNWYQQKPGKAPKLLISAASSL | (Human) | (Human) | (Human) | (Human) | | SCYFSAFDI |
| | | | QSGVPSRFSGSGSGTDFTLTISSLQPED | | | | | | |
| | | | FATYYCQQSYSTPRTFGPGTKVEIK | | | | | | |
| | 2M-13A3 | 1188 | AIRMTQSPDSLAVSLGERATINCKSSQ | IGHV3-30 | IGHJ3 | IGKV4-1 | IGKJ5 | 2100 | ARGGGSYYY |
| | | | SVLYSPNNKNYLAWYQQKPGQPPKLL | (Human) | (Human) | (Human) | (Human) | | WFDP |
| | | | IYWASTRESGVPDRFSGSGSGTDFTLTI | | | | | | |
| | | | SSLQAEDVAVYYCQQYYSTPFTFGQGT | | | | | | |
| | | | RLEIK | | | | | | |
| | 2M- | 1189 | EIVMTQSPGTLSLSPGERATLSCRASQ | IGHV4-34 | IGHJ3 | IGKV3-20 | IGKJ1 | 2101 | ARAGYSSSWY |
| | 13D11 | | SVSSSYLAWYQQKPGQAPRLLIYGASS | (Human) | (Human) | (Human) | (Human) | | GVRGVDP |
| | | | RATGIPDRFSGSGSGTDFTLTISRLEPE | | | | | | |
| | | | DFAVYYCQQYGSSRSWTFGQGTKVEI | | | | | | |
| | | | K | | | | | | |
| | 2M-14B2 | 1190 | AIRMTQSPSSLSASVGDRVTITCRASQ | IGHV3-30 | IGHJ5 | IGKV1-39 | IGKJ3 | 2102 | AKGSDIVWP |
| | | | SISSYLNWYQQKPGKAPKLLIYAASSLQ | (Human) | (Human) | (Human) | (Human) | | VGNWFDP |
| | | | SGVPSRFSGSGSGTDFTLTISSLQPEDF | | | | | | |
| | | | ATYYCQQSYSTFTLYTFGQGTKVDIK | | | | | | |
| | 2M-14E4 | 1191 | DIVMTQSPSSLSASVGDRVSITCRASQ | IGHV4-61 | IGHJ4 | IGKV1-39 | IGKJ3 | 2103 | ARVQRYYPDS |
| | | | NISNYLNWYQQKPGEAPKLLISAASSL | (Human) | (Human) | (Human) | (Human) | | SGFYGRRFDI |
| | | | QSGVPSRFGGSGSGTGFTLTINSLQPE | | | | | | |
| | | | DFATYYCQQSHSFPFTFGPGTKVDIK | | | | | | |
| | 2M-14E5 | 1192 | AIRMTQSPSFLSVSVGDRVTITCRASQ | IGHV3-30 | IGHJ4 | IGKV1-9 | IGKJ4 | 2104 | ARSGGGSYR |
| | | | GISSYLAWYQQKPGKAPKLLIYAASTL | (Human) | (Human) | (Human) | (Human) | | GPFDY |
| | | | QSGVPSRFSGSGSGTEFTLTISSLQPED | | | | | | |
| | | | FATYYCQQLNSYVTFGGGTKVEIK | | | | | | |
| | 2M-2D1 | 1193 | QSVLTQLPSASGTPGQTVTISCSGNVF | IGHV4-39 | IGHJ3 | IGLV1-47 | IGU3 | 2105 | ARGDRIQLW |
| | | | KEKSNYVYWYQQLPGTAPKLLIYRNN | (Human) | (Human) | (Human) | (Human) | | LLDAFDI |
| | | | HRPSGVPDRFSGSKSGTSPSLAISGLRS | | | | | | |
| | | | EDEADYYCAARDDSLSGWVFSGRTKL | | | | | | |
| | | | TVL | | | | | | |
| | 2M-2D4 | 1194 | EIVMTQSPATLSLSPGERATLSCRASQS | IGHV3-23 | IGHJ4 | IGKV3-11 | IGKJ3 | 2106 | AKIGLGLGGL |
| | | | VSTSLAWYQQKPGQAPRLLIYDASNR | (Human) | (Human) | (Human) | (Human) | | LRRYFDY |
| | | | ATGVPARFSGSGSGTDFTLTISSLEPDD | | | | | | |
| | | | FAVYYCQQRTNWPLFGPGTKVEIK | | | | | | |
| | 2M-2G12 | 1195 | DIQMTQSPSSLSVSAGERATLSCRASQ | IGHV3-11 | IGHJ6 | IGKV1-39 | IGKJ1 | 2107 | GTRIMITWYS |
| | | | SVSSYLIWCHQKPGKAPKLLIYDASTLQ | (Human) | (Human) | (Human) | (Human) | | RRGMDG |
| | | | TGVPSRFIGGGSGTNFTLTIISLQPEDF | | | | | | |
| | | | AAYYCQQNYSTWTIGQGSRVEMK | | | | | | |
| | 2M-4G4 | 1196 | QSVLTQPASVSGSPGQSITISCTGTSSD | IGHV1-46 | IGHJ6 | IGLV2-23 | IGU3 | 2108 | ARERGDSSGY |
| | | | VGMYNLVSWYQQHPGQAPKLMIYE | (Human) | (Human) | (Human) | (Human) | | YEIITTANRRF |
| | | | GSKRPSGVSNRFSGSKSGNTASLTISGL | | | | | | GMDV |
| | | | QAEDEAYYYCCSYAVSSTWVFGGGTK | | | | | | |
| | | | LTVL | | | | | | |
| | 2M-7E9 | 1197 | DIVMTQSPATLSLSPGERATLSCRASQ | IGHV1-69 | IGHJ6 | IGKV3-11 | IGKJ3 | 2109 | ARIPGWDRG |
| | | | SVSNFLAWYQQKPGQAPRLLIYDASN | (Human) | (Human) | (Human) | (Human) | | TDRNWNDD |
| | | | RATGIPARFSGSGSGTDFTLTISSLEPE | | | | | | |
| | | | DFAVYYCQQRSNWPPAFTFGPGTKVE | | | | | | |
| | | | IK | | | | | | |
| | 2M-8E7 | 1198 | EIVLTQSPATLSLSPGERATLSCRASQS | IGHV1-69 | IGHJ4 | IGKV3-11 | IGKJ5 | 2110 | ARTYSFDSSG |
| | | | VSSYLAWYQQKPGQAPRLLIYDASNR | (Human) | (Human) | (Human) | (Human) | | YYYDY |
| | | | ATGIPARFSGSGSGTDFTLTISSLEPED | | | | | | |
| | | | FAVYYCQQRSNWPPKITFGQGTRLEIK | | | | | | |
| | 2M-8H10 | 1199 | DIQMTQSPDSLAVSLGERATIKCKSSQ | IGHV3-30 | IGHJ5 | IGKV4-1 | IGKJ1 | 2111 | ARAFYDSNW |
| | | | SVLHSSNNKNYLAWYQQKAGQPPSLL | (Human) | (Human) | (Human) | (Human) | | SVGSYFDS |
| | | | LYWASTRESGVPDRFSGSGSGTDFTLT | | | | | | |
| | | | ISSLQAEDVAVYYCQQYYNNQWTFGQ | | | | | | |
| | | | GTKVDIK | | | | | | |
| | 2M-9F10 | 1200 | AIRMTQSPSSLSASVGDRVTISCRATQ | IGHV3-9 | IGHJ4 | IGKV1-39 | IGKJ3 | 2112 | AKDSVRREYT |
| | | | NINYFLNWYQQKPGRAPKLLIYAASGL | (Human) | (Human) | (Human) | (Human) | | HARVPFDN |
| | | | QSGVPSRFSGSGTGRVFTLTINSLQPD | | | | | | |
| | | | DFATYYCQQSFVSPRTFGQGTKVDIK | | | | | | |
| | 2M-9H1 | 1201 | DIVMTQSPSSLSAFVGDRVTITCRASR | IGHV3-30 | IGHJ4 | IGKV1-17 | IGKJ4 | 2113 | AKSSKIFYLGE |
| | | | DIGGDLSWFQQKPGKAPERLIYAASSL | (Human) | (Human) | (Human) | (Human) | | SREVDY |
| | | | ESGVPSRFSGSGSATEFALTITSLQPED | | | | | | |
| | | | FATYYCLQHKSYPLTFGGGTKVDIK | | | | | | |
| | 31B5 | | ND | ND | ND | ND | ND | 2114 | ARVEYYYGSG |
| | | | | | | | | | SYMPWYFDL |
| | 31B9 | | ND | ND | ND | ND | ND | 2115 | ATYYYDSSGYS |
| | | | | | | | | | YGMDV |
| | 32D4 | | ND | ND | ND | ND | ND | 2116 | TEEGSGSEGP |
| | | | | | | | | | IEFDY |
| | 413-2 | | ND | ND | ND | ND | ND | 2117 | ARDNNYRNY |
| | | | | | | | | | YYYMDVW |
| | 414-1 | | ND | ND | ND | ND | ND | 2118 | ARGALGCSST |
| | | | | | | | | | SCYPNNFDY |
| | | | | | | | | | W |
| | 47D11 | | ND | ND | ND | ND | ND | 2119 | ND |
| | 4A8 | 1202 | EIVMTQSPLSSPVTLGQPASISCRSSQS | IGHV1-24 | IGHJ6 | IGKV2-24 | IGKJ3 | 2120 | ATSTAVAGTP |
| | | | LVHSDGNTYLSWLQQRPGQPPRLLIY | (Human) | (Human) | (Human) | (Human) | | DLFDYYYGM |
| | | | KISNRFSGVPDRFSGSGAGTDFTLKISR | | | | | | DV |
| | | | VEAEDVGVYYCTQATQFPYTFGQGTK | | | | | | |
| | | | VDIK | | | | | | |
| | 505-3 | | ND | ND | ND | ND | ND | 2121 | ARDFISRPRG |
| | | | | | | | | | YRW |
| | 505-5 | | ND | ND | ND | ND | ND | 2122 | ARDFISRPRG |
| | | | | | | | | | YRW |
| | 505-8 | | ND | ND | ND | ND | ND | 2123 | ARGQDDFWS |
| | | | | | | | | | MNWFDPW |
| | 515-1 | | ND | ND | ND | ND | ND | 2124 | ARDFISRPRG |
| | | | | | | | | | YRW |
| | 515-5 | | ND | ND | ND | ND | ND | 2125 | TRGSQWATI |
| | | | | | | | | | NDARFDYW |
| | 553-15 | | ND | ND | ND | ND | ND | 2126 | ARVWYYYGP |
| | | | | | | | | | RDYW |
| | 553-49 | | ND | ND | ND | ND | ND | 2127 | AKDSSSWYNY |
| | | | | | | | | | YGMDVW |
| | 553-60 | | ND | ND | ND | ND | ND | 2128 | ARVFRGSQY |
| | | | | | | | | | WFDPW |
| | 553-63 | | ND | ND | ND | ND | ND | 2129 | ARMEAPKLTL |
| | | | | | | | | | DPW |
| | 8D2 | 1203 | DIQMTQSPSSLSASVGDRVTITCRASQ | IGHV3-7 | IGHJ3 | IGKV1-17 | IGKJ4 | 2130 | ARDWDYDILT |
| | | | GIRNDLGWYQQKPGKAPKRLIYAASSL | (Human) | (Human) | (Human) | (Human) | | GSWFGAFDI |
| | | | QSGVPSRFSGSGSGTEFTLTISSLQPED | | | | | | |
| | | | FATYYCLQHNSYPLTFGGGTKVEIK | | | | | | |
| | 8D9 | 1204 | SYELTQPPSVSVSPGQTASITCSGDKLG | IGHV3-7 | IGHJ4 | IGLV3-1 | IGU3 | 2131 | ARPTIGYSYGS |
| | | | DKYACWYRQKPGQSPVLVIYQDSKRP | (Human) | (Human) | (Human) | (Human) | | DY |
| | | | SGIPERFSGSNSGNTATLTISGTQAMD | | | | | | |
| | | | EADYYCQAWDSSTGVFGGGTKLTVL | | | | | | |
| | 9A1 | 1205 | DIVMTQSPATLSASPGERVTLSCRASQ | IGHV3-30 | IGHJ6 | IGKV3-15 | IGKJ3 | 2132 | AKVSAIFWLG |
| | | | NIRNNLAWYQQKPGQAPRLLIHGAST | (Human) | (Human) | (Human) | (Human) | | QGLSPIDV |
| | | | RAAGAPARFSGSGSDTQFTLTVSSLQS | | | | | | |
| | | | EDFAVYYCHQYSKWPVTFGGGTKVDI | | | | | | |
| | | | K | | | | | | |
| | Ab_510A | | ND | IGHV2-70 | IGHJ4 | IGKV2-28 | IGKJ1 | 2133 | ARVQVAAAG |
| | | | | (Human) | (Human) | (Human) | (Human) | | SPYDY |
| | Ab_510A5 | | ND | IGHV3-9 | IGHJ4 | IGKV1-39 | IGKJ2 | 2134 | AKDRGYEILTP |
| | | | | (Human) | (Human) | (Human) | (Human) | | ASFDY |
| | Ab_510D7 | | ND | IGHV1-69 | IGHJ4 | IGKV3-20 | IGKJ2 | 2135 | ATGRYTYGYG |
| | | | | (Human) | (Human) | (Human) | (Human) | | YYFDY |
| | Ab_510G | | ND | IGHV4-31 | IGHJ4 | IGKV1-33 | IGKJ4 | 2136 | ARDYGGNSN |
| | | | | (Human) | (Human) | (Human) | (Human) | | YFHY |
| | Ab_510H10 | | ND | IGHV2-70 | IGHJ4 | IGKV1-39 | IGKJ2 | 2137 | ARIQRGIAAD |
| | | | | (Human) | (Human) | (Human) | (Human) | | Y |
| | Ab_510H2 | | ND | IGHV3-66 | IGHJ4 | IGKV1-9 | IGKJ4 | 2138 | ARDKWEGTF |
| | | | | (Human) | (Human) | (Human) | (Human) | | DY |
| | Ab_510H | | ND | IGHV3-66 | IGHJ6 | IGKV3-11 | IGKJ1 | 2139 | AETGWDGM |
| | | | | (Human) | (Human) | (Human) | (Human) | | DV |
| | Ab_510H7 | | ND | IGHV4-59 | IGHJ5 | IGKV1D-13 | IGKJ4 | 2140 | ARHCPWQQL |
| | | | | (Human) | (Human) | (Human) | (Human) | | VSNWFDP |
| | Ab_511A1 | | ND | IGHV4-31 | IGHJ6 | IGKV3-15 | IGKJ1 | 2141 | AREKIRSIAAA |
| | | | | (Human) | (Human) | (Human) | (Human) | | GTVYYYGMD |
| | | | | | | | | | V |
| | Ab_511A5 | | ND | IGHV4-31 | IGHJ2 | IGLV3-21 | IGU1 | 2142 | ARIYRGTMVV |
| | | | | (Human) | (Human) | (Human) | (Human) | | VFSDLHWYFD |
| | | | | | | | | | L |
| | Ab_511B11 | | ND | IGHV3-7 | IGHJ4 | IGLV1-40 | IGU1 | 2143 | AGLFWYGGY |
| | | | | (Human) | (Human) | (Human) | (Human) | | FDY |
| | Ab_511B | | ND | IGHV4-59 | IGHJ5 | IGKV1D-12 | IGKJ4 | 2144 | ASTYWDSSGY |
| | | | | (Human) | (Human) | (Human) | (Human) | | YYGVDY |
| | Ab_511D11 | | ND | IGHV1-18 | IGHJ6 | IGKV3-20 | IGKJ2 | 2145 | AVLDYCSGGS |
| | | | | (Human) | (Human) | (Human) | (Human) | | SSSGYYNYGM |
| | | | | | | | | | DV |
| | Ab_511E5 | | ND | IGHV1-2 | IGHJ2 | IGLV1-40 | IGU2 | 2146 | ARDSLFSRVD |
| | | | | (Human) | (Human) | (Human) | (Human) | | WYFDL |
| | Ab_511E7 | | ND | IGHV5-51 | IGHJ4 | IGKV1-33 | IGKJ3 | 2147 | ALAVGRGIPT |
| | | | | (Human) | (Human) | (Human) | (Human) | | SYFDY |
| | Ab_511E9 | | ND | IGHV1-18 | IGHJ4 | IGKV6-21 | IGKJ2 | 2148 | AREGAGLIIAY |
| | | | | (Human) | (Human) | (Human) | (Human) | | DY |
| | Ab_511G5 | | ND | IGHV1-46 | IGHJ4 | IGLV1-47 | IGU3 | 2149 | ARDGALYSNS |
| | | | | (Human) | (Human) | (Human) | (Human) | | PTEFDY |
| | Ab_511G7 | | ND | IGHV3-33 | IGHJ4 | IGKV1-33 | IGKJ4 | 2150 | AKGGNYGDY |
| | | | | (Human) | (Human) | (Human) | (Human) | | LRGFDY |
| | Ab_511H11 | | ND | IGHV3-33 | IGHJ6 | IGKV1-39 | IGKJ1 | 2151 | VRGDHSSGW |
| | | | | (Human) | (Human) | (Human) | (Human) | | YGTYYYYMDV |
| | Ab_511H7 | | ND | IGHV3-23 | IGHJ6 | IGLV1-47 | IGU3 | 2152 | ARGLQYYYDT |
| | | | | (Human) | (Human) | (Human) | (Human) | | SGYYKDSYYY |
| | | | | | | | | | GVDV |
| | Ab_51A1 | | ND | IGHV3-66 | IGHJ3 | IGKV1-9 | IGKJ5 | 2153 | ARDLNIAGGF |
| | | | | (Human) | (Human) | (Human) | (Human) | | DI |
| | Ab_51A3 | | ND | IGHV1-18 | IGHJ4 | IGKV3-11 | IGKJ5 | 2154 | ARDLAWFGE |
| | | | | (Human) | (Human) | (Human) | (Human) | | LSESPIEY |
| | Ab_51D2 | | ND | IGHV2-5 | IGHJ3 | IGKV1-39 | IGKJ4 | 2155 | AHRLAPDYDF |
| | | | | (Human) | (Human) | (Human) | (Human) | | LTGYYNGDD |
| | | | | | | | | | AFDV |
| | Ab_51D3 | | ND | IGHV3-66 | IGHJ6 | IGKV1-33 | IGKJ2 | 2156 | AREGLLVGPT |
| | | | | (Human) | (Human) | (Human) | (Human) | | GRGLGMDV |
| | Ab_51D4 | | ND | IGHV2-70 | IGHJ4 | IGKV1-39 | IGKJ2 | 2157 | ARMVVRGV |
| | | | | (Human) | (Human) | (Human) | (Human) | | MLDY |
| | Ab_51D7 | | ND | IGHV5-51 | IGHJ3 | IGKV1-39 | IGKJ2 | 2158 | ATRTGWTND |
| | | | | (Human) | (Human) | (Human) | (Human) | | AFDI |
| | Ab_51E10 | | ND | IGHV1-18 | IGHJ2 | IGKV4-1 | IGKJ4 | 2159 | ARARQLVLN |
| | | | | (Human) | (Human) | (Human) | (Human) | | WYFDL |
| | Ab_51E12 | | ND | IGHV3-7 | IGHJ4 | IGKV1-8 | IGKJ2 | 2160 | ARLMYYYGNF |
| | | | | (Human) | (Human) | (Human) | (Human) | | DY |
| | Ab_51E7 | | ND | IGHV3-13 | IGHJ2 | IGKV1-39 | IGKJ1 | 2161 | ARVGYYGSGS |
| | | | | (Human) | (Human) | (Human) | (Human) | | YPLYWYFDL |
| | Ab_51F11 | | ND | IGHV1-69 | IGHJ4 | IGKV3-20 | IGKJ2 | 2162 | ATGRYTYGYG |
| | | | | (Human) | (Human) | (Human) | (Human) | | YYFDY |
| | Ab_52C1 | | ND | IGHV3-66 | IGHJ4 | IGLV1-40 | IGU3 | 2163 | ARLASDGSGS |
| | | | | (Human) | (Human) | (Human) | (Human) | | YLDYFDY |
| | Ab_52C6 | | ND | IGHV1-69 | IGHJ6 | IGLV8-61 | IGU2 | 2164 | ATDGGGGSY |
| | | | | (Human) | (Human) | (Human) | (Human) | | YYAHYYYGM |
| | Ab_52F7 | | ND | IGHV3-9 | IGHJ6 | IGKV2D-30 | IGKJ2 | 2165 | AKDIGVMVP |
| | | | | (Human) | (Human) | (Human) | (Human) | | GVTPYGMDV |
| | Ab_52G9 | | ND | IGHV3-66 | IGHJ6 | IGKV1-33 | IGKJ1 | 2166 | ARDPMRPG |
| | | | | (Human) | (Human) | (Human) | (Human) | | MDV |
| | Ab_53C10 | | ND | IGHV3-43 | IGHJ4 | IGLV3-21 | IGU1 | 2167 | ARESPKLTGY |
| | | | | (Human) | (Human) | (Human) | (Human) | | FDY |
| | Ab_53C5 | | ND | IGHV1-69 | IGHJ4 | IGKV1-5 | IGKJ2 | 2168 | ARGRYTYGTE |
| | | | | (Human) | (Human) | (Human) | (Human) | | GYFDN |
| | Ab_53F12 | | ND | IGHV3-66 | IGHJ6 | IGKV3-15 | IGKJ2 | 2169 | ARDAVGSYYY |
| | | | | (Human) | (Human) | (Human) | (Human) | | GMEV |
| | Ab_53F9 | | ND | IGHV3-53 | IGHJ4 | IGKV2D-30 | IGKJ2 | 2170 | AREGLVGTTL |
| | | | | (Human) | (Human) | (Human) | (Human) | | TFDY |
| | Ab_53H3 | | ND | IGHV3-66 | IGHJ3 | IGKV1-33 | IGKJ3 | 2171 | ARYYGPQGR |
| | | | | (Human) | (Human) | (Human) | (Human) | | AFDI |
| | Ab_55A8 | | ND | IGHV1-69 | IGHJ4 | IGKV1-5 | IGKJ2 | 2172 | ARGTEYGDYD |
| | | | | (Human) | (Human) | (Human) | (Human) | | VSHD |
| | Ab_55C9 | | ND | IGHV3-53 | IGHJ4 | IGKV1-39 | IGKJ2 | 2173 | AREGLVGTAL |
| | | | | (Human) | (Human) | (Human) | (Human) | | AFDY |
| | Ab_56C12 | | ND | IGHV3-30 | IGHJ5 | IGKV1-39 | IGKJ1 | 2174 | AKDPTSLYCS |
| | | | | (Human) | (Human) | (Human) | (Human) | | GGSCYNNWF |
| | Ab_56D7 | | ND | IGHV3-66 | IGHJ6 | IGKV1-9 | IGKJ5 | 2175 | ARDLDYYGM |
| | | | | (Human) | (Human) | (Human) | (Human) | | DV |
| | Ab_56E1 | | ND | IGHV3-30 | IGHJ3 | IGLV1-44 | IGU3 | 2176 | AGGGVLVTS |
| | | | | (Human) | (Human) | (Human) | (Human) | | DPDAFDI |
| | Ab_56H11 | | ND | IGHV4-4 | IGHJ4 | IGLV1-44 | IGU3 | 2177 | AGEQHIVTTII |
| | | | | (Human) | (Human) | (Human) | (Human) | | DY |
| | Ab_56H3 | | ND | IGHV3-66 | IGHJ4 | IGKV3-20 | IGKJ1 | 2178 | ARDYGDYYFD |
| | | | | (Human) | (Human) | (Human) | (Human) | | Y |
| | Ab_57A6 | | ND | IGHV5-51 | IGHJ4 | IGLV3-19 | IGU3 | 2179 | ARQESGWSF |
| | | | | (Human) | (Human) | (Human) | (Human) | | DY |
| | Ab_57A8 | | ND | IGHV3-23 | IGHJ4 | IGKV1-5 | IGKJ4 | 2180 | AKGQRGSPD |
| | | | | (Human) | (Human) | (Human) | (Human) | | FFDY |
| | Ab_57A9 | | ND | IGHV1-3 | IGHJ4 | IGKV4-1 | IGKJ1 | 2181 | ARAGWELNY |
| | | | | (Human) | (Human) | (Human) | (Human) | | |
| | Ab_57B8 | | ND | IGHV3-53 | IGHJ4 | IGKV1-9 | IGKJ5 | 2182 | ARDLVTWGL |
| | | | | (Human) | (Human) | (Human) | (Human) | | DY |
| | Ab_57C4 | | ND | IGHV3-15 | IGHJ5 | IGKV1-39 | IGKJ4 | 2183 | STTNDYGDYS |
| | | | | (Human) | (Human) | (Human) | (Human) | | ANY |
| | Ab_57E11 | | ND | IGHV1-8 | IGHJ5 | IGLV1-44 | IGU3 | 2184 | ARGLWFGDL |
| | | | | (Human) | (Human) | (Human) | (Human) | | TRTKYNWFD |
| | | | | | | | | | P |
| | Ab_57F7 | | ND | IGHV4-34 | IGHJ6 | IGLV1-44 | IGU3 | 2185 | ARDDSSSSGV |
| | | | | (Human) | (Human) | (Human) | (Human) | | GTGMDV |
| | Ab_57G9 | | ND | IGHV2-70 | IGHJ4 | IGKV1-39 | IGKJ2 | 2186 | ARITPHLVYDY |
| | | | | (Human) | (Human) | (Human) | (Human) | | |
| | Ab_58A4 | | ND | IGHV4-59 | IGHJ5 | IGKV3-20 | IGKJ1 | 2187 | ARTLGAYYDIL |
| | | | | (Human) | (Human) | (Human) | (Human) | | TGFRTPGGW |
| | | | | | | | | | FAP |
| | Ab_58D2 | | ND | IGHV3-11 | IGHJ2 | IGKV3-11 | IGKJ2 | 2188 | ASPLLSHNYG |
| | | | | (Human) | (Human) | (Human) | (Human) | | SGSYYNVYWY |
| | | | | | | | | | FEL |
| | Ab_58G1 | | ND | IGHV3-53 | IGHJ6 | IGKV1D-12 | IGKJ4 | 2189 | ARDLENGGL |
| | | | | (Human) | (Human) | (Human) | (Human) | | DV |
| | Ab_58G6 | | ND | IGHV1-58 | IGHJ3 | IGKV3-20 | IGKJ1 | 2190 | AAPNCNSTTC |
| | | | | (Human) | (Human) | (Human) | (Human) | | HDGFDI |
| | Ab_59A2 | | ND | IGHV3-66 | IGHJ4 | IGKV1-33 | IGKJ3 | 2191 | ARDLPLHGDY |
| | | | | (Human) | (Human) | (Human) | (Human) | | FDY |
| | Ab_59D6 | | ND | IGHV4-34 | IGHJ4 | IGLV1-40 | IGU2 | 2192 | ARHRRDYITM |
| | | | | (Human) | (Human) | (Human) | (Human) | | IVRPTRLWAF |
| | | | | | | | | | DY |
| | Ab_81A11 | | ND | IGHV1-69 | IGHJ2 | IGLV1-40 | IGU2 | 2193 | AREAGTTDW |
| | | | | (Human) | (Human) | (Human) | (Human) | | YFDL |
| | Ab_81C3 | | ND | IGHV4-39 | IGHJ4 | IGLV2-14 | IGU1 | 2194 | ARHPRFSWR |
| | | | | (Human) | (Human) | (Human) | (Human) | | GNDSGYFDY |
| | Ab_81C7 | | ND | IGHV2-5 | IGHJ4 | IGLV1-36 | IGU3 | 2195 | AHSMVRGVL |
| | | | | (Human) | (Human) | (Human) | (Human) | | FGADFDY |
| | Ab_81C8 | | ND | IGHV3-33 | IGHJ4 | IGKV1-39 | IGKJ1 | 2196 | ARDGVDFGM |
| | | | | (Human) | (Human) | (Human) | (Human) | | VTLFDY |
| | Ab_81E1 | | ND | IGHV1-24 | IGHJ4 | IGLV1-47 | IGU2 | 2197 | AITSVARGLR |
| | | | | (Human) | (Human) | (Human) | (Human) | | GYFDT |
| | Ab_81E10 | | ND | IGHV1-24 | IGHJ4 | IGLV1-47 | IGU2 | 2198 | AITSLARGLKG |
| | | | | (Human) | (Human) | (Human) | (Human) | | YFDS |
| | Ab_81F2 | | ND | IGHV4-34 | IGHJ5 | IGKV2-28 | IGKJ4 | 2199 | ARGWTVPPL |
| | | | | (Human) | (Human) | (Human) | (Human) | | WVLNWFDP |
| | Ab_82B6 | | ND | IGHV4-61 | IGHJ5 | IGKV2-30 | IGKJ1 | 2200 | AMTYYDYIW |
| | | | | (Human) | (Human) | (Human) | (Human) | | GRVDPQFDP |
| | Ab_82C6 | | ND | IGHV4-39 | IGHJ4 | IGKV2-30 | IGKJ2 | 2201 | ARFITDGYSS |
| | | | | (Human) | (Human) | (Human) | (Human) | | GSDS |
| | Ab_82F6 | | ND | IGHV3-30 | IGHJ4 | IGKV1-33 | IGKJ4 | 2202 | AKQASPYCSG |
| | | | | (Human) | (Human) | (Human) | (Human) | | GSCYSGNFDY |
| | Acharya | | Various | Various | Various | Various | Various | | Various |
| | et al., | | | | | | | | |
| | 2020 | | | | | | | | |
| | B38 | 1206 | DIVMTQSPSFLSASVGDRVTITCRASQ | IGHV3-53 | IGHJ6 | IGKV1-9 | IGKJ2 | 2203 | AREAYGMDV |
| | | | GISSYLAWYQQKPGKAPKLLIYAASTL | (Human) | (Human) | (Human) | (Human) | | |
| | | | QSGVPSRFSGSGSGTEFTLTISSLQPED | | | | | | |
| | | | FATYYCQQLNSYPPYTFGQGTKLEIK | | | | | | |
| | BD-236 | | ND | IGHV3-53 | IGHJ6 | ND | ND | 2204 | ARDLGEAGG |
| | | | | (Human) | (Human) | | | | MDV |
| | BD-368-2 | | ND | ND | ND | ND | ND | | ND |
| | BD-494 | | ND | IGHV3-53 | IGHJ6 | IGKV1-9 | IGKJ3 | 2205 | ARDLVVYGM |
| | | | | (Human) | (Human) | (Human) | (Human) | | DV |
| | BD-498 | | ND | IGHV3-66 | IGHJ6 | IGKV1-9 | IGKJ5 | 2206 | ARDLVVYGM |
| | | | | (Human) | (Human) | (Human) | (Human) | | DV |
| | BD-500 | | ND | IGHV3-53 | IGHJ6 | IGKV1-39 | IGKJ5 | 2207 | ARDAMSYG |
| | | | | (Human) | (Human) | (Human) | (Human) | | MDV |
| | BD-503 | | ND | IGHV3-53 | IGHJ6 | IGKV1-39 | IGKJ3 | 2208 | ARDAAVYGID |
| | | | | (Human) | (Human) | (Human) | (Human) | | V |
| | BD-504 | | ND | IGHV3-66 | IGHJ6 | IGKV1-9 | IGKJ3 | 2209 | ARDLISRGMD |
| | | | | (Human) | (Human) | (Human) | (Human) | | V |
| | BD-505 | | ND | IGHV3-53 | IGHJ6 | IGKV1-33 | IGKJ5 | 2210 | ARDRVVYGM |
| | | | | (Human) | (Human) | (Human) | (Human) | | DV |
| | BD-506 | | ND | IGHV3-53 | IGHJ6 | IGKV1-9 | IGKJ4 | 2211 | ARDLVSYGM |
| | | | | (Human) | (Human) | (Human) | (Human) | | DV |
| | BD-507 | | ND | IGHV3-53 | IGHJ6 | IGKV1-9 | IGKJ3 | 2212 | ARDLVVYGM |
| | | | | (Human) | (Human) | (Human) | (Human) | | DV |
| | BD-508 | | ND | IGHV3-53 | IGHJ6 | IGKV1-39 | IGKJ2 | 2213 | ARDAQNYG |
| | | | | (Human) | (Human) | (Human) | (Human) | | MDV |
| | BD-515 | | ND | IGHV3-66 | IGHJ4 | IGKV1-39 | IGKJ5 | | ND |
| | | | | (Human) | (Human) | (Human) | (Human) | | |
| | BD-604 | | ND | IGHV3-53 | IGHJ6 | IGKV1-9 | IGKJ2 | 2214 | ARDLGPYGM |
| | | | | (Human) | (Human) | (Human) | (Human) | | DV |
| | BD-629 | | ND | IGHV3-53 | IGHJ4 | IGKV3-20 | IGKJ1 | 2215 | ARDYGDYYFD |
| | | | | (Human) | (Human) | (Human) | (Human) | | Y |
| | BD23 | 1207 | DIQMTQSPSTLSASVGDRVTITCRASQ | IGHV7-4- | IGHJ6 | IGKV1-5 | IGKJ2 | 2216 | ARPQGGSSW |
| | | | SISSWLAWYQQKPGKAPKLLIYKASSL | 1 | (Human) | (Human) | (Human) | | YRDYYYGMD |
| | | | ESGVPSRFSGSGSGTEFTLTISSLQPDD | (Human) | | | | | V |
| | | | FATYYCQQYNSYPYTFGQGTKLEIK | | | | | | |
| | Bertoglio | | 17 | Various | Various | Various | Various | | Various |
| | et al., | | | | | | | | |
| | 2020 | | | | | | | | |
| | C002 | 1208 | DIQLTQSPSSLSASVGDRVTITCRASQS | IGHV3-30 | IGHJ4 | IGKV1-39 | IGKJ1 | 2217 | AKEGRPSDIV |
| | | | ISSYLNWYQQKPGKAPKLLIYAASSLQS | (Human) | (Human) | (Human) | (Human) | | VWAFDY |
| | | | GVPSRFSGSGSGTDFTLTISSLQPEDFA | | | | | | |
| | | | TYYCQQSYSTPRTFGQGTKVEIK | | | | | | |
| | C003 | 1209 | EIVLTQSPGTLSLSPGERATLSCRASQS | IGHV3-53 | IGHJ4 | IGKV3-20 | IGKJ2 | 2218 | ARDYGDFYFD |
| | | | VSSTYLAWYQQKPGQAPRLLIYGASSR | (Human) | (Human) | (Human) | (Human) | | Y |
| | | | ATGIPDRFSGSGSGTDFTLTISRLEPED | | | | | | |
| | | | FAVYYCQQYGSSPRTFGQGTKLEIK | | | | | | |
| | C004 | 1210 | AIRMTQSPSSLSASVGDRVTITCQASQ | IGHV1-2 | IGHJ6 | IGKV1-33 | IGKJ5 | 2219 | ASPASRGYSG |
| | | | DISNYLNWYQQKPGKAPKLLIYDASNL | (Human) | (Human) | (Human) | (Human) | | YDHGYYYYM |
| | | | ETGVPSRFSGSGSGTDFTFTISSLQPED | | | | | | DV |
| | | | IATYYCQQYDNLPITFGQGTRLEIK | | | | | | |
| | C005 | 1211 | EIVLTQSPGTLSLSPGERATLSCRASQS | IGHV1-58 | IGHJ3 | IGKV3-20 | IGKJ1 | 2220 | AAPHCSGGSC |
| | | | VRSSYLAWYQQKPGQAPRLLIYGASSR | (Human) | (Human) | (Human) | (Human) | | LDAFDI |
| | | | ATGIPDRFSGSGSGTDFTLTISRLEPED | | | | | | |
| | | | FAVYYCQQYGSSPWTFGQGTKVEIK | | | | | | |
| | C006 | 1212 | QSVLTQPPSASGTPGQRVTVSCSGSSS | IGHV3-11 | IGHJ6 | IGLV1-44 | IGU3 | 2221 | ARRGDGSSSI |
| | | | NIGSNTVNWYQQLPGTAPKLLIYSNN | (Human) | (Human) | (Human) | (Human) | | YYYNYMDV |
| | | | QRPSGVPDRFSGSKSGTSASLAISGLQ | | | | | | |
| | | | SEDEADYFCAAWDDSLNGPVFGGGT | | | | | | |
| | | | KLTVL | | | | | | |
| | C008 | 1213 | DIQMTQSPSTLSASVGDRVTITCRANQ | IGHV3-30 | IGHJ4 | IGKV1-5 | IGKJ1 | 2222 | AREFGDPEW |
| | | | SISSWLAWYQQKPGKAPKLLIYKASSL | (Human) | (Human) | (Human) | (Human) | | YFDY |
| | | | ESGVPSRFSGSGSGTEFTLTISSLQPDD | | | | | | |
| | | | FATYYCQQYNSYWTFGQGTKVEIK | | | | | | |
| | C009 | 1214 | QSALTQPPSASGSPGQSVTISCTGTSS | IGHV1-2 | IGHJ4 | IGLV2-8 | IGU3 | 2223 | ARDSPFSALG |
| | | | DVGGYNYVSWYQQHPGKAPKLMIYE | (Human) | (Human) | (Human) | (Human) | | ASNDY |
| | | | VSKRPSGVPDRFSGSKSGNTASLTVSG | | | | | | |
| | | | LQAEDEAEYYCSSDAGSNNVVFGGGT | | | | | | |
| | | | KLTVL | | | | | | |
| | C010 | 1215 | DIQLTQSPSSLSASVGDRVTITCRASQS | IGHV3-30 | IGHJ4 | IGKV1-39 | IGKJ1 | 2224 | ARDGIVDTAL |
| | | | ISTYLNWYQQKPGKAPKLLIYAASSLQS | (Human) | (Human) | (Human) | (Human) | | VTWFDY |
| | | | GVPSRFSGSGSGTDFTLTISSLQPEDFA | | | | | | |
| | | | TYYCQQSYSTPPWTFGQGTKVEIK | | | | | | |
| | C013 | 1216 | EIVLTQSPATLSLSPGERATLSCRASQS | IGHV1-69 | IGHJ6 | IGKV3-11 | IGKJ4 | 2225 | ARGNRLLYCS |
| | | | VSSYLAWYQQKPGQAPRLLIYDASNR | (Human) | (Human) | (Human) | (Human) | | STSCYLDAVR |
| | | | ATGIPARFSGSGSGTDFTLTISSLEPED | | | | | | QGYYYYYYM |
| | | | FAVYYCQQRSNWPLTFGGGTKVEIK | | | | | | DV |
| | C016 | 1217 | AIRMTQSPSSLSASVGDRVTITCQASQ | IGHV3-30 | IGHJ4 | IGKV1-33 | IGKJ4 | 2226 | AKVTAPYCSG |
| | | | DISNYLNWYQQKPGKAPKLLIYDASNL | (Human) | (Human) | (Human) | (Human) | | GSCYGGNFDY |
| | | | ETGVPSRFSGSGSGTDFTFTINSLQPED | | | | | | |
| | | | IATYYCQQYDNLPPTFGGGTKVEIK | | | | | | |
| | C017 | 1218 | EIVLTQSPATLSLSPGERATLSCRASQS | IGHV3-9 | IGHJ4 | IGKV3-11 | IGKJ5 | 2227 | AKAGVRGIAA |
| | | | VSSYLAWYQQKPGQAPRLLIYDASNR | (Human) | (Human) | (Human) | (Human) | | AGPDLNFDH |
| | | | ATGIPARFSGSGSGTDFTLTISSLEPED | | | | | | |
| | | | FAVYYCQQRITFGQGTRLEIK | | | | | | |
| | C018 | 1219 | DIQLTQSPSSLSASVGDRVTITCRASQS | IGHV3-30 | IGHJ4 | IGKV1-39 | IGKJ2 | 2228 | ARDFDDSSF |
| | | | IRSYLNWYQQKPGKAPKLLIYAASSLQ | (Human) | (Human) | (Human) | (Human) | | WAFDY |
| | | | SGVPSRFSGSGSGTDFTLTISSLQPDDF | | | | | | |
| | | | ATYYCQQSYSTPPATFGQGTKLEIK | | | | | | |
| | C019 | 1220 | SYELTQPPSVSVAPGKTARITCGENNI | IGHV1-46 | IGHJ5 | IGLV3-21 | IGU3 | 2229 | ARVPREGTPG |
| | | | GSKSVHWYQQKPGQAPVLVIYYDSDR | (Human) | (Human) | (Human) | (Human) | | FDP |
| | | | PSGIPERFSGSNSGNTATLTINRVEAG | | | | | | |
| | | | DEADYYCQVWDSSSDHVVFGGGTKL | | | | | | |
| | | | TVL | | | | | | |
| | C021 | 1221 | DIVMTQSPLSLPVTPGEPASISCRSSQS | IGHV4-31 | IGHJ4 | IGKV2-28 | IGKJ3 | 2230 | ARVWQYYDS |
| | | | LLHSNGYNYLDWYLQKPGQSPQLLIYL | (Human) | (Human) | (Human) | (Human) | | SGSFDY |
| | | | GSNRASGVPDRFSGSGSGTDFTLKISR | | | | | | |
| | | | VEAEDVGVYYCMQALQTPFTFGPGTK | | | | | | |
| | | | VDIK | | | | | | |
| | C022 | 1222 | DIQMTQSPSTLSASVGDSVTITCRASQ | IGHV4-39 | IGHJ1 | IGKV1-5 | IGKJ2 | 2231 | ARHAAAYYDR |
| | | | SISSWLAWYQQKPGKAPKLLIYKASSL | (Human) | (Human) | (Human) | (Human) | | SGYYFIEYFQH |
| | | | ESGVPSRFSGSGSGTEFTLTISSLQPDD | | | | | | |
| | | | FATYYCQQYNNYRYTFGQGTKLEIK | | | | | | |
| | C027 | 1223 | DIQMTQSPSTLSASVGDRVTITCRASQ | IGHV3-30 | IGHJ4 | IGKV1-5 | IGKJ1 | 2232 | AKASGIYCSG |
| | | | SISSWLAWYQQKPGKAPKLLIYKASSL | (Human) | (Human) | (Human) | (Human) | | GDCYSYYFDY |
| | | | ESGVPSRFSGSGSGTEFTLTISSLQPDD | | | | | | |
| | | | FATYYCQQYNSYSTFGQGTKVEIK | | | | | | |
| | C029 | 1224 | DIVMTQSPLSLPVTPGEPASISCRSSQS | IGHV4-31 | IGHJ4 | IGKV2-28 | IGKJ4 | 2233 | ARTMYYYDSS |
| | | | LLHSNGYNYLDWYLQKPGQSPQLLIYL | (Human) | (Human) | (Human) | (Human) | | GSFDY |
| | | | GSNRASGVPDRFSGSGSGTDFTLKISR | | | | | | |
| | | | VEAEDVGVYYCMQALQTPHTFGGGT | | | | | | |
| | | | KVEIK | | | | | | |
| | C030 | 1225 | DIQMTQSPSTLSASVGDRVTITCRASQ | IGHV3-30 | IGHJ4 | IGKV1-5 | IGKJ1 | 2234 | AKASGIYCSG |
| | | | SISSWLAWYQQKPGKAPKLLIYKASSL | (Human) | (Human) | (Human) | (Human) | | GNCYSYYFDY |
| | | | ESGVPSRFSGSGSGTEFTLTISSLQPDD | | | | | | |
| | | | FATYYCQQYNSYSTFGQGTKVEIK | | | | | | |
| | C031 | 1226 | DIQMTQSPSSLSASVGDRVTITCRASQ | IGHV3-13 | IGHJ2 | IGKV1-39 | IGKJ4 | 2235 | ARVGYDSSGY |
| | | | SISSYLNWYQQKPGKAPKVLIYAASSL | (Human) | (Human) | (Human) | (Human) | | SGWYFDL |
| | | | QSGVPSRFSGSGSGTDFTLTISSLQPED | | | | | | |
| | | | FATYYCQQSYSTPPLTFGGGTKVEIK | | | | | | |
| | C101 | 1227 | EIVLTQSPGTLSLSPGERATLSCRASQS | IGHV3-53 | IGHJ4 | IGKV3-20 | IGKJ1 | 2236 | VRDYGDFYFD |
| | | | VSSSYLAWYQQKPGQAPRLLIYGASSR | (Human) | (Human) | (Human) | (Human) | | Y |
| | | | ATGIPDRFSGGGSETDFTLTISRLEPED | | | | | | |
| | | | CAVYYCQQYGSSPRTFGQGTKVEIK | | | | | | |
| | C102 | 1228 | EIVLTQSPGTLSLSPGERATLSCRASQS | IGHV3-53 | IGHJ4 | IGKV3-20 | IGKJ1 | 2237 | ARDYGDYYFD |
| | | | VSSSYLAWYQQKPGQAPRLLIYGASSR | (Human) | (Human) | (Human) | (Human) | | Y |
| | | | ATGIPDRFSGSGSGTDFTLTISRLEPED | | | | | | |
| | | | FAVYYCQQYGSSPRTFGQGTKVEIK | | | | | | |
| | C103 | 1229 | EIVLTQSPGTLSLSPGERATLSCRASQT | IGHV4-34 | IGHJ3 | IGKV3-20 | IGKJ4 | 2238 | ARKPLLYSDFS |
| | | | VTANYLAWYQQKPGQAPRLLIYGASK | (Human) | (Human) | (Human) | (Human) | | PGAFDI |
| | | | RATGIPDRFSGSGSGTDFTLSISRLEPE | | | | | | |
| | | | DFAVYYCQQYTTTPRTFGGGTKVEIK | | | | | | |
| | C104 | 1230 | EIVLTQSPGTVSLSPGERATLSCWASQ | IGHV4-34 | IGHJ3 | IGKV3-20 | IGKJ4 | 2239 | ARKPLLYSNLS |
| | | | SVSASYLAWYQQKPGQAPRLLIYGASS | (Human) | (Human) | (Human) | (Human) | | PGAFDI |
| | | | RATGIPDRFSGSGSGTDFTLTISRLEPE | | | | | | |
| | | | DFAVYYCQQYGTTPRTFGGGTKVEIK | | | | | | |
| | C105 | 1231 | QSALTQPPSASGSPGQSVTISCTGTSS | IGHV3-53 | IGHJ4 | IGLV2-8 | IGU3 | 2240 | ARGEGWELP |
| | | | DVGGYKYVSWYQQHPGKAPKLMIYE | (Human) | (Human) | (Human) | (Human) | | YDY |
| | | | VSKRPSGVPDRFSGSKSGNTASLTVSG | | | | | | |
| | | | LQAEDEADYYCSSYEGSNNFVVFGGG | | | | | | |
| | | | TKLTVL | | | | | | |
| | C106 | 1232 | SYELTQPPSVSVAPGKTARITCGGNNI | IGHV4-61 | IGHJ4 | IGLV3-21 | IGU3 | 2241 | ARERPGGTYS |
| | | | GSKSVHWYQQKPGQAPVLVIYFDSDR | (Human) | (Human) | (Human) | (Human) | | NTWYTPTDT |
| | | | PSGIPERFSGSNSGNTATLTISRVEAGD | | | | | | NWFDT |
| | | | EADYYCQVWDSSRDHVVFGGGTKLT | | | | | | |
| | | | VL | | | | | | |
| | C107 | 1233 | QSVLTQPPSASGTPGQRVTISCSGSSS | IGHV1-18 | IGHJ4 | IGLV1-47 | IGU3 | 2242 | ARGEAVAGTT |
| | | | NIGSNYVYWYQQLPGTAPKLLIYRNN | (Human) | (Human) | (Human) | (Human) | | GFFDY |
| | | | QRPSGVPDRFSGSKSGTSASLAISGLRS | | | | | | |
| | | | EDEADYYCAAWDDSLSGFVVFGGGTK | | | | | | |
| | | | LTVL | | | | | | |
| | C108 | 1234 | QSALTQPASVSGSPGQSITISCTGTSSD | IGHV4-4 | IGHJ3 | IGLV2-14 | IGU1 | 2243 | VRDGGRPGD |
| | | | VGGYNYVSWYQQHPGKAPKLMIYDV | (Human) | (Human) | (Human) | (Human) | | AFDI |
| | | | SNRPSGVSNRFSGSKSGNTASLTISGL | | | | | | |
| | | | QAEDEADYYCNSYTSSSTRVFGTGTKV | | | | | | |
| | | | TVL | | | | | | |
| | C109 | 1235 | QSALTQPPSASGSPGQSVTISCTGTSS | IGHV3-7 | IGHJ4 | IGLV2-8 | IGU3 | 2244 | AIQLWLRGGY |
| | | | DVGGYNYVSWYQQHPGKAPKLMIYE | (Human) | (Human) | (Human) | (Human) | | DY |
| | | | VTKRPSGVPDRFSGSKSGNTASLTVSG | | | | | | |
| | | | LQAEDEADYYCSSYAGSNNYVVFGGG | | | | | | |
| | | | TKLTVL | | | | | | |
| | C110 | 1236 | DIQMTQSPSTLSASVGDRVTITCRASQ | IGHV5-51 | IGHJ3 | IGKV1-5 | IGKJ2 | 2245 | ARSFRDDPRI |
| | | | SISYWLAWYQQKPGKAPKLLIYQASSL | (Human) | (Human) | (Human) | (Human) | | AVAGPADAF |
| | | | ESGVPSRFSGSESGTEFTLTISSLQPDD | | | | | | DI |
| | | | FATYYCQQYNSYPYTFGQGTKLEIK | | | | | | |
| | C111 | 1237 | QSVLTQPPSVSEAPRQRVTISCSGSSS | IGHV4-59 | IGHJ3 | IGLV1-36 | IGU3 | 2246 | ARVEDWGYC |
| | | | NIGNNAVNWYQQVPGKAPKLLIYYDD | (Human) | (Human) | (Human) | (Human) | | SSTNCYSGAF |
| | | | LLPSGVSDRFSGSKSGTSASLAISGLQS | | | | | | DI |
| | | | EDEADYYCAAWDDSLNGAWVFGGG | | | | | | |
| | | | TKLTVL | | | | | | |
| | C112 | 1238 | QSALTQPASVSGSPGQSITISCTGTSSD | IGHV3-30 | IGHJ4 | IGLV2-14 | IGU3 | 2247 | AREDYYDSSG |
| | | | VGGYNYVSWYQQHPGKAPKLMIYDV | (Human) | (Human) | (Human) | (Human) | | SFDY |
| | | | SNRPSGVSNRFSGSKSGNTASLTISGL | | | | | | |
| | | | QAEDEADYYCSSYTSSSTWVFGGGTKL | | | | | | |
| | | | TVL | | | | | | |
| | C113 | 1239 | DIQMTQSPSTLSASVGDRVTITCRASQ | IGHV3-33 | IGHJ3 | IGKV1-5 | IGKJ4 | 2248 | ARGVNPDDIL |
| | | | SMSSWLAWYQQKPGNAPKLLIYKASS | (Human) | (Human) | (Human) | (Human) | | TGVDAFDI |
| | | | LESGVPSRFSGSGSGTEFTLTISSLQPD | | | | | | |
| | | | DFATYYCQQHNSSPLTFGGGTKVEIK | | | | | | |
| | C114 | 1240 | QSVLTQPPSVSGAPGQRVTISCTGTSS | IGHV3-53 | IGHJ4 | IGLV1-40 | IGU3 | 2249 | ARGDGELFFD |
| | | | NIGAGYDVHWYQQLPGRAPKVLISGN | (Human) | (Human) | (Human) | (Human) | | Q |
| | | | NIRPSEVPDRFSGSRSGTSASLAITSLQ | | | | | | |
| | | | PEDEAQYYCQSYDSSLYAVFGGGTKLT | | | | | | |
| | | | VL | | | | | | |
| | C115 | 1241 | DIVMTQSPLSLSVTPGEPASISCRSSQS | IGHV3-49 | IGHJ4 | IGKV2-28 | IGKJ2 | 2250 | TRWDGWSQ |
| | | | LLHSNGNNYFDWYLQKPGQSPQLLIY | (Human) | (Human) | (Human) | (Human) | | HDY |
| | | | LGSNRASGVPDRFSGSGSGTDFTLKIS | | | | | | |
| | | | RVEAEDVGVYYCMQVLQIPYTFGQGT | | | | | | |
| | | | KLEIK | | | | | | |
| | C116 | 1242 | NFMLTQPHSVSESPGKTVTISCTGSSG | IGHV3-30 | IGHJ5 | IGLV6-57 | IGU3 | 2251 | ARDFYHNWF |
| | | | SIASNYVQWYQQRPGSAPTTVIYEDN | (Human) | (Human) | (Human) | (Human) | | DP |
| | | | QRPSGVPDRFSGSIDRSSNSASLTISGL | | | | | | |
| | | | KTEDEADYYCQSYDSGNHWVVFGGG | | | | | | |
| | | | TRLTVL | | | | | | |
| | C117 | 1243 | QSVLTQPPSVSAAPGQKVTISCSGSSS | IGHV3-30 | IGHJ4 | IGLV1-51 | IGU1 | 2252 | ARDPIWFGEL |
| | | | NIGNNLVSWYQQLPGTAPKLLIYENN | (Human) | (Human) | (Human) | (Human) | | LSPPFVHFDY |
| | | | KRPSGIPDRFSGSKSGTSATLGITGLQT | | | | | | |
| | | | GDEADYYCGAWDSSLSAGGVYVFGT | | | | | | |
| | | | GTKVTVL | | | | | | |
| | C118 | 1244 | QPVLTQSPSASASLGASVKLTCTLSSGH | IGHV3-30 | IGHJ6 | IGLV4-69 | IGU3 | 2253 | ASGYTGYDYF |
| | | | SSYAIAWHQQQPEKGPRYLMKLNTD | (Human) | (Human) | (Human) | (Human) | | VRGDYYGLD |
| | | | GSHSKGDGIPDRFSGSSSGAERYLTISS | | | | | | V |
| | | | LQSEDEADYYCQTWGTGILVFGGGTK | | | | | | |
| | | | LTVL | | | | | | |
| | C119 | 1245 | QSALTQPASVSGSPGQSITISCTGTSSD | IGHV1-46 | IGHJ6 | IGLV2-14 | IGU3 | 2254 | ARANHETTM |
| | | | VGGYKYVSWYQRHPGKAPKLMIYDV | (Human) | (Human) | (Human) | (Human) | | DTYYYYYYMD |
| | | | SNRPSGVSNRFSGSKSGNTASLTISGL | | | | | | V |
| | | | QAEDEADYYCSSYTSSSTSVVFGGGTQ | | | | | | |
| | | | LTVL | | | | | | |
| | C120 | 1246 | AIRMTQSPSSLSASVGDTVTITCQASQ | IGHV3-53 | IGHJ4 | IGKV1-33 | IGKJ4 | 2255 | AREGMGMA |
| | | | DISKYLNWYQQKPGKAPKLLIYDASNL | (Human) | (Human) | (Human) | (Human) | | AAGT |
| | | | ETGVPSRFSGSGSGTDFTFTISSLQPED | | | | | | |
| | | | IATYYCQQYDNLPQTFGGGTKVEIK | | | | | | |
| | C121 | 1247 | QSALTQPASVSGSPGQSITISCTGTSSD | IGHV1-2 | IGHJ6 | IGLV2-23 | IGU3 | 2256 | ARAPLFPTGV |
| | | | VGSYNLVSWYQQHPGKAPKLMIYEGS | (Human) | (Human) | (Human) | (Human) | | LAGDYYYYG |
| | | | KRPSGVSNRFSGSKSGNTASLTISGLQ | | | | | | MDV |
| | | | AEDEADYYCCSYAGSSTLVFGGGTKLT | | | | | | |
| | | | VL | | | | | | |
| | C122 | 1248 | DIQLTQSPSFLSASVGDRVTITCRASQG | IGHV3-53 | IGHJ4 | IGKV1-9 | IGKJ2 | 2257 | ARESGDTTM |
| | | | ISSYLAWYQQKPGKAPKLLIYAASTLQS | (Human) | (Human) | (Human) | (Human) | | AFDY |
| | | | GVPSRFSGSGSGTEFTLTISSLQPEDFA | | | | | | |
| | | | TYYCQQLNSDSYTFGQGTKLEIK | | | | | | |
| | C123 | 1249 | DIQLTQSPSFLSASVGDRVTITCRASQG | IGHV3-53 | IGHJ3 | IGKV1-9 | IGKJ5 | 2258 | ARDLSAAFDI |
| | | | ISSYLAWYQQKPGKAPKLLIYAASTLQS | (Human) | (Human) | (Human) | (Human) | | |
| | | | GVPSRFSGSGSGTEFTLTISSLQPEDFA | | | | | | |
| | | | TYYCQQLNSYPPAFGQGTRLEIK | | | | | | |
| | C124 | 1250 | EIVLTQSPATLSLSPGERATLSCRASQS | IGHV3-48 | IGHJ4 | IGKV3-11 | IGKJ1 | 2259 | AREGARVGA |
| | | | FSSYLAWYQQKPGQAPRLLIYDASNRA | (Human) | (Human) | (Human) | (Human) | | TYDTYYFDY |
| | | | TGIPARFSGSGSGTDFTLTISSLEPEDF | | | | | | |
| | | | AVYYCQQRNNWPPEWTFGQGTKVEIK | | | | | | |
| | C125 | 1251 | EIVLTQSPGTLSLSPGERATLSCRASQS | IGHV1-58 | IGHJ3 | IGKV3-20 | IGKJ1 | 2260 | AAPYCSGGSC |
| | | | VSSSYLAWYQQKPGQAPRLLIYGASSR | (Human) | (Human) | (Human) | (Human) | | SDAFDI |
| | | | ATGIPDRFSGSGSGTDFTLTISRLEPED | | | | | | |
| | | | FAVYYCQQYGSSPWTFGQGTKVEIK | | | | | | |
| | C126 | 1252 | NFMLTQPHSVSESPGKTVTISCTGSSG | IGHV4-59 | IGHJ3 | IGLV6-57 | IGU3 | 2261 | ARLQWLRGA |
| | | | SIASNYVQWYQQRPGSAPTTVINEDN | (Human) | (Human) | (Human) | (Human) | | FDI |
| | | | QRPSGVPDRFSGSIDSSSNSASLTISGL | | | | | | |
| | | | KTEDEADYYCQSYDSSNLVFGGGTKLT | | | | | | |
| | | | VL | | | | | | |
| | C127 | 1253 | QSVLTQPPSASGTPGQRVTISCSGSSS | IGHV1-2 | IGHJ6 | IGLV1-44 | IGU3 | 2262 | ATAHPRRIQG |
| | | | NIGSNTVNWYQQLPGTAPKLLIYSNN | (Human) | (Human) | (Human) | (Human) | | VFFLGPGV |
| | | | QRPSGVPDRFSGSKSGTSASLAISGLQ | | | | | | |
| | | | SEDEADYYCAAWDDSLNGVVFGGGT | | | | | | |
| | | | KLTVL | | | | | | |
| | C128 | 1254 | EIVLTQSPGTLSLSPGERATLSCRASQS | IGHV3-23 | IGHJ6 | IGKV3-20 | IGKJ4 | 2263 | ANHPLASGD |
| | | | VNSRQLAWYQQKPGQAPRLLIYGASS | (Human) | (Human) | (Human) | (Human) | | DYYHYYMDV |
| | | | RATGIPERFSGSGSGTDFTLTISRLESE | | | | | | |
| | | | DFAVYHCQQYGSSRALTFGGGTKVEIK | | | | | | |
| | C130 | 1255 | SYELTQPPSVSVAPGKTARITCGGNNI | IGHV1-46 | IGHJ2 | IGLV3-21 | IGU3 | 2264 | ARSRPTPDW |
| | | | GSKSVHWYQQKPGQAPVLVIYYDSDR | (Human) | (Human) | (Human) | (Human) | | YFDL |
| | | | PSGIPERFSGSNSGNTATLTISRVEAGD | | | | | | |
| | | | EADYYCQVWDSSSDHPGVVFGGGTK | | | | | | |
| | | | LTVL | | | | | | |
| | C131 | 1256 | EIVMTQSPATLSVSPGERATLSCRASQ | IGHV1-69 | IGHJ6 | IGKV3-15 | IGKJ5 | 2265 | ARVNQAVTT |
| | | | SVSSNLAWYQQKPGQAPRLLIYGAST | (Human) | (Human) | (Human) | (Human) | | PFSMDV |
| | | | RATGIPARFSGSGSGTEFTLTISSLQSE | | | | | | |
| | | | DFAVYYCQQYNNWPITFGQGTRLEIK | | | | | | |
| | C132 | 1257 | QSALTQPASVSGSPGQSITISCTGTSSD | IGHV4-4 | IGHJ4 | IGLV2-14 | IGU3 | 2266 | ARGGDTAMG |
| | | | VGGYNYVSWYQQHPGKAPKLMIYDV | (Human) | (Human) | (Human) | (Human) | | PEYFDY |
| | | | SNRPSGVSNRFSGSKSGNTASLTISGL | | | | | | |
| | | | QAEDEADYYCSSYTSSSTLLFGGGTKLT | | | | | | |
| | | | VL | | | | | | |
| | C133 | 1258 | DIQMTQSPSSLSASVGDRVTITCRASQ | IGHV3-30 | IGHJ4 | IGKV1-39 | IGKJ1 | 2267 | ARDSDVDTS |
| | | | SISSYLNWYQQKPGKAPKLLIYAASSLQ | (Human) | (Human) | (Human) | (Human) | | MVTWFDY |
| | | | SGVPSRFSGSGSGTDFTLTISSLQPEDF | | | | | | |
| | | | ATYYCQQSYSTPPWTFGQGTKVEIK | | | | | | |
| | C134 | 1259 | SYELTQPPSVSVAPGKTARITCGGNNI | IGHV3-23 | IGHJ4 | IGLV3-21 | IGU3 | 2268 | AKDPLITGPTY |
| | | | GSKSVHWYQQKPGQAPVLVIYYDSDR | (Human) | (Human) | (Human) | (Human) | | QYFHY |
| | | | PSGIPERFSGSNSGNTATLTISRVEAGD | | | | | | |
| | | | EAEYHCQVWDSSSDRPGVVFGGGTK | | | | | | |
| | | | LTVL | | | | | | |
| | C135 | 1260 | DIQMTQSPSTLSASVGDRVTITCRASQ | IGHV3-30 | IGHJ4 | IGKV1-5 | IGKJ1 | 2269 | ASSSGYLFHS |
| | | | SISNWLAWFQQKPGKAPKLLIYEASSL | (Human) | (Human) | (Human) | (Human) | | DY |
| | | | ESGVPSRFSGSGSGTEFTLTISSLQPDD | | | | | | |
| | | | FATYYCQQYNSYPWTFGQGTKVEIK | | | | | | |
| | C138 | 1261 | NFMLTQPHSVSESPGKTVTISCTGSSG | IGHV3-7 | IGHJ4 | IGLV6-57 | IGU3 | 2270 | AGGTWLRSSF |
| | | | SIASNYVQWYQQRPGSAPTTVIYEDN | (Human) | (Human) | (Human) | (Human) | | DY |
| | | | QRPSGVPDRFSGSIDSSSNSASLTISGL | | | | | | |
| | | | KTEDEADYYCQSYDSSNWVFGGGTKL | | | | | | |
| | | | TVL | | | | | | |
| | C139 | 1262 | DIQMTQSPSSLSASVGDRVTITCQASQ | IGHV3- | IGHJ6 | IGKV1-33 | IGKJ4 | 2271 | AKGGAYSYYY |
| | | | DISNYLNWYQQKPGKAPKLLIYDASNL | 303 | (Human) | (Human) | (Human) | | YMDV |
| | | | ETGVPSRFSGSGSGTDFTFTISSLQPED | (Human) | | | | | |
| | | | IATYYCQQYDNLPLTFGGGTKVEIK | | | | | | |
| | C140 | 1263 | DIQLTQSPSFLSASVGDRVTITCRASQG | IGHV3-66 | IGHJ6 | IGKV1-9 | IGKJ2 | 2272 | ARDLYYYGM |
| | | | ISSYLAWYQQKPGKAPKLLIYAASTLQS | (Human) | (Human) | (Human) | (Human) | | DV |
| | | | GVPSRFSGSGSGTEFTLTISSLQPEDFA | | | | | | |
| | | | TYYCQQLNSYSYTFGQGTKLEIK | | | | | | |
| | C141 | 1264 | NFMLTQPHSVSESPGKTVTISCTGSSG | IGHV3-30 | IGHJ4 | IGLV6-57 | IGU3 | 2273 | ARADLGYCTN |
| | | | SIASNYVQWYQQRPGSAPTTVIYEDN | (Human) | (Human) | (Human) | (Human) | | GVCYVDY |
| | | | QRPSGVPDRFSGSIDSSSNSASLTISGL | | | | | | |
| | | | KTEDEADYYCQSYDSSNWVFGGGTKL | | | | | | |
| | | | TVL | | | | | | |
| | C143 | 1265 | QSALTQPASVSGSPGQSITISCTGTSND | IGHV3-66 | IGHJ3 | IGLV2-23 | IGU3 | 2274 | ARDSSEVRDH |
| | | | VGSYTLVSWYQQYPGKAPKLLIFEGTK | (Human) | (Human) | (Human) | (Human) | | PGHPGRSVG |
| | | | RSSGISNRFSGSKSGNTASLTISGLQGE | | | | | | AFDI |
| | | | DEADYYCCSYAGASTFVFGGGTKLTVL | | | | | | |
| | C144 | 1266 | QSALTQPASVSGSPGQSITISCTGTSSD | IGHV3-53 | IGHJ4 | IGLV2-14 | IGU1 | 2275 | AREGEVEGY |
| | | | VGGYNYVSWYQQHPGKAPKLMIYDV | (Human) | (Human) | (Human) | (Human) | | NDFWSGYSR |
| | | | SNRPSGVSNRFSGSKSGNTASLTISGL | | | | | | DRYYFDY |
| | | | QAEDEADYYCSSYTSSSTRVFGTGTKV | | | | | | |
| | | | TVL | | | | | | |
| | C145 | 1267 | QSALTQPASVSGSPGQSITISCTGTSSD | IGHV3-53 | IGHJ4 | IGLV2-14 | IGU1 | 2276 | AREGEVEGYY |
| | | | VGGYNYVSWYQQHPGKAPKLMIYDV | (Human) | (Human) | (Human) | (Human) | | DFWSGYSRD |
| | | | SNRPSGVSNRFSGSKSGNTASLTISGL | | | | | | RYYFDY |
| | | | QAEDEADYYCSSYTSSTTRVFGTGTRV | | | | | | |
| | | | TVL | | | | | | |
| | C146 | 1268 | QSALTQPASVSGSPGQSITISCTGTSSD | IGHV3-21 | IGHJ4 | IGLV2-14 | IGU1 | 2277 | ARDVASNYAY |
| | | | IGVYNYISWSQQHPGKAPKVMIYDVT | (Human) | (Human) | (Human) | (Human) | | FDL |
| | | | NRPSGVSNRFSGSKSGNTASLTISGLQ | | | | | | |
| | | | AEDEADYYCSSYRGSSTPYVFGTGTKV | | | | | | |
| | | | TVL | | | | | | |
| | C147 | 1269 | QAVVTQEPSLTVSPGGTVTLTCGSSTG | IGHV5-51 | IGHJ5 | IGLV7-46 | IGU3 | 2278 | ARLSDRWYSP |
| | | | AVTSGHYPYWFQQKSGQAPRTLIYETS | (Human) | (Human) | (Human) | (Human) | | FDP |
| | | | IKHSWTPARFSGSLLGGKAALTLSGAQ | | | | | | |
| | | | PEDEADYYCLLSYSGARPVFGGGTKLT | | | | | | |
| | | | VL | | | | | | |
| | C148 | 1270 | EIVMTQSPATLSVSPGERATLSCRASQ | IGHV3-66 | IGHJ6 | IGKV3-15 | IGKJ4 | 2279 | ARIANYMDV |
| | | | SVSSHLAWYQQKPGQAPRLLIYGAST | (Human) | (Human) | (Human) | (Human) | | |
| | | | RATGIPTRFSGSGSGTEFTLTISSLQSE | | | | | | |
| | | | DFAVYYCQQYNNWPPLTFGGGTKVEIK | | | | | | |
| | C150 | 1271 | QSALTQPASVSGSPGQSITISCTGTSSD | IGHV3-74 | IGHJ6 | IGLV2-14 | IGU3 | 2280 | ARPTAVAAA |
| | | | VGYYNFVSWYQQHPGKAPKLMIYEVS | (Human) | (Human) | (Human) | (Human) | | GNYFYYYGM |
| | | | NRPSGVSNRFSGSKSGNTASLIISGLQA | | | | | | DV |
| | | | EDEADYYCSSYRSSSTLVFGGGTKLTVL | | | | | | |
| | C151 | 1272 | NFMLTQPHSVSESPGKTVTISCTGSSG | IGHV3-21 | IGHJ4 | IGLV6-57 | IGU3 | 2281 | ARERGYDGG |
| | | | SIASNYVQWYQQRPGSAPTTVIYEDN | (Human) | (Human) | (Human) | (Human) | | KTPP |
| | | | QRPSGVPDRFSGSIDSSSNSASLTISGL | | | | | | |
| | | | KTEDEADYYCQSYDSSNYWVFGGGTK | | | | | | |
| | | | LTVL | | | | | | |
| | C153 | 1273 | QSALTQPASVSGSPGQSITISCTGTSSD | IGHV3-53 | IGHJ4 | IGLV2-23 | IGU3 | 2282 | ARVGGAHSG |
| | | | VGSYNLVSWYQQHPGKAPKLMIYEGS | (Human) | (Human) | (Human) | (Human) | | YDGSFDY |
| | | | KRPSGVSNRFSGSKSGNTASLTISGLQ | | | | | | |
| | | | AEDEADYYCCSYAGSSTWVFGGGTKL | | | | | | |
| | | | TVL | | | | | | |
| | C154 | 1274 | DIQMTQSPSSLSASVGDRVTITCQASQ | IGHV3-30 | IGHJ4 | IGKV1-33 | IGKJ5 | 2283 | AKQAGPYCS |
| | | | GISNYLNWYQQKPGKAPKLLIYDASNL | (Human) | (Human) | (Human) | (Human) | | GGSCYSAPFD |
| | | | ETGVPSRFSGSGSGTDFTFTISSLQPED | | | | | | Y |
| | | | IATYYCQQYDNLPITFGQGTRLEIK | | | | | | |
| | C155 | 1275 | EIVMTQSPATLSVSPGERATLSCRASQ | IGHV3-53 | IGHJ4 | IGKV3-15 | IGKJ1 | 2284 | ARDFGEFYFD |
| | | | SVSSNLAWYQQKPGQAPRLLIYGAST | (Human) | (Human) | (Human) | (Human) | | Y |
| | | | RATAIPARFSGSGSGTEFTLTISSLQSE | | | | | | |
| | | | DFAVYYCQQYNNWPRTFGQGTKVEIK | | | | | | |
| | C156 | 1276 | SYELTQPPSVSVAPGQTARISCGGNNI | IGHV3-30 | IGHJ4 | IGLV3-21 | IGU3 | 2285 | AKDPFPLAVA |
| | | | GSKNVHWYQQKPGQAPVLVVYDDS | (Human) | (Human) | (Human) | (Human) | | GTGYFDY |
| | | | DRPSGIPERFSGSNSGNTATLTISRVEA | | | | | | |
| | | | GDEADYYCQVWDSSSDPWVFGGGTK | | | | | | |
| | | | LTVL | | | | | | |
| | C164 | 1277 | QSALTQPASVSGSPGQSITISCTGTSSD | IGHV3-66 | IGHJ3 | IGLV2-23 | IGU3 | 2286 | ARDSSEVRDH |
| | | | VGSYTLVSWYQQYPGKAPKLLIFEVTK | (Human) | (Human) | (Human) | (Human) | | PGHPGRSVG |
| | | | RSSGISNRFSGSKSGNTASLTISGLQGE | | | | | | AFDI |
| | | | DEADYYCCSYAGASTFVFGGGTKLTVL | | | | | | |
| | C165 | 1278 | EIVLTQSPGTLSLSPGERATLSCRASQS | IGHV1-69 | IGHJ3 | IGKV3-20 | IGKJ1 | 2287 | ARDLLDPQLD |
| | | | VSSTYLAWYQQKPGQAPRLLIYGASSR | (Human) | (Human) | (Human) | (Human) | | DAFDI |
| | | | ATGIPDRFSGSGSGTDFTLTISRLEPED | | | | | | |
| | | | FAVYYCQQYGSSPWTFGQGTKVEIK | | | | | | |
| | C201 | 1279 | IRMTQSPSSVSASVGDRVTITCRASQG | IGHV3-9 | IGHJ4 | IGKV1-12 | IGKJ4 | 2288 | VKGVEYSSSS |
| | | | ISSWLAWYQQKPGKAPKLLIYVESSLQ | (Human) | (Human) | (Human) | (Human) | | NFDY |
| | | | SGVPSRFSGSGSGTDFTLTISSLQPEDF | | | | | | |
| | | | ATYYCQQANSFPLTFGGGTKVEIK | | | | | | |
| | C202 | 1280 | DIQLTQSPSSLSASVGDRVTITCQASQ | IGHV3-66 | IGHJ4 | IGKV1-33 | IGKJ2 | 2289 | ARDTLGRGG |
| | | | DISNYLNWYQQKPGKAPKLLIYDASNL | (Human) | (Human) | (Human) | (Human) | | DY |
| | | | ETGVPSRFSGSGSGTDFTFTISSLQPED | | | | | | |
| | | | IATYYCQQYDNLPRSFGQGTKLEIK | | | | | | |
| | C204 | 1281 | DIQLTQSPSSLSASVGDRVTITCRASQS | IGHV3-23 | IGHJ5 | IGKV1-39 | IGKJ1 | 2290 | ARESDCGSTS |
| | | | ISSYLNWYQQKPGKAPKLLIYAASSLQS | (Human) | (Human) | (Human) | (Human) | | CYQVGWFDP |
| | | | GVPSRFSGSGSGTDFTLTISSLQPEDFA | | | | | | |
| | | | TYYCQQSYSTPPWTFGQGTKVEIK | | | | | | |
| | C205 | 1282 | EIVLTQSPGTLSLSPGERATLSCRASQS | IGHV1-46 | IGHJ4 | IGKV3-20 | IGKJ1 | 2291 | ARGPERGIVG |
| | | | VSSSYLAWYQQKPGQAPRLLIYGASSR | (Human) | (Human) | (Human) | (Human) | | ATDYFDY |
| | | | ATGIPDRFSGSGSGTDFTLTISRLEPED | | | | | | |
| | | | FAVYYCQQYVSSPWTFGQGTKVEIK | | | | | | |
| | C207 | 1283 | EIVLTQSPATLSLSPGERATLSCRASQS | IGHV3-23 | IGHJ4 | IGKV3-11 | IGKJ1 | 2292 | AKEPIGQPLL |
| | | | VSSYLAWYQQKPGQAPRLLIYDASNR | (Human) | (Human) | (Human) | (Human) | | WWDY |
| | | | ATGIPARFSGSGSGTDFTLTISSLEPED | | | | | | |
| | | | FAVYYCQQRSNWPRGFGQGTKVEIK | | | | | | |
| | C208 | 1284 | EIVLTQSPGTLSLSPGERATLSCRASQS | IGHV5-51 | IGHJ5 | IGKV3-20 | IGKJ4 | 2293 | ARGPNLQNW |
| | | | VSGSYLAWYQQRPGQAPRLLIYGASS | (Human) | (Human) | (Human) | (Human) | | FDP |
| | | | RATGIPDRFSGSGSGTDFTLTISRLEPE | | | | | | |
| | | | DFAVYYCQQYGSSLTFGGGTKVEIK | | | | | | |
| | C210 | 1285 | DIQLTQSPSFLSASVGDRVTITCRASQG | IGHV3-53 | IGHJ6 | IGKV1-9 | IGKJ4 | 2294 | ARDLMAYGM |
| | | | ISSYLAWYQQKPGKAPKLLIYAASTLQS | (Human) | (Human) | (Human) | (Human) | | DV |
| | | | GVPSRFSGSGSGTEFTLTISSLQPEDFA | | | | | | |
| | | | TYYCQQLNSYPQGTFGGGTKVEIK | | | | | | |
| | C211 | 1286 | EIVMTQSPATLSVSPGERATLSCRASQ | IGHV3-66 | IGHJ4 | IGKV3-15 | IGKJ1 | 2295 | ARDYGDFYFD |
| | | | SVSSNLAWYQQKPGQGPRLLIYGAST | (Human) | (Human) | (Human) | (Human) | | F |
| | | | RATGIPARFSGSGSGTEFTLTISSLQSE | | | | | | |
| | | | DFAVYYCQQYNNWPRTFGQGTKVEIK | | | | | | |
| | C212 | 1287 | LTQPASVSGSPGQSITISCTGTSSDVGS | IGHV1-2 | IGHJ6 | IGLV2-23 | IGU3 | 2296 | ARERYFDLGG |
| | | | YNLVSWYQQHPGKAPKLMIYEDSKRP | (Human) | (Human) | (Human) | (Human) | | MDV |
| | | | SGVSNRFSGSKSGNTASLTISGLQAED | | | | | | |
| | | | EADYYCCSYAGSSTRLFGGGTKLTVL | | | | | | |
| | C214 | 1288 | DIQLTQSPSSLSASVGDRVTITCRASQS | IGHV3-33 | IGHJ5 | IGKV1-39 | IGKJ1 | 2297 | ARDVGRVTT |
| | | | ISSYLTWYQQKPGKAPKLLIYAASSLQS | (Human) | (Human) | (Human) | (Human) | | WFDP |
| | | | GVPSRFSGSGSGTDFTLTISSLQPEDFA | | | | | | |
| | | | TYYCQQSYSTPPWTFGQGTKVEIK | | | | | | |
| | C215 | 1289 | DIQLTQSPSSLSASVGDRVTITCRASQS | IGHV3-23 | IGHJ5 | IGKV1-39 | IGKJ1 | 2298 | ASEEDYSNYV |
| | | | ISSYLNWYQQKPGKAPKLLIYAASSLQS | (Human) | (Human) | (Human) | (Human) | | GWFDP |
| | | | GVPSRFSGSGSGTDFTLTISSLQPEDFA | | | | | | |
| | | | TYYCQQSYSTPPWTFGQGTKVEIK | | | | | | |
| | C216 | 1290 | DIQLTQSPSSLSASVGDRVTITCRASQS | IGHV3-13 | IGHJ2 | IGKV1-39 | IGKJ5 | 2299 | ARDRGSSGW |
| | | | ISSYLNWYQQKPGKAPKLLIYVASSLQS | (Human) | (Human) | (Human) | (Human) | | YGWYFDL |
| | | | GVPSRFSGSGSGTDFTLTISSLQPEDFA | | | | | | |
| | | | TYYCQQSYSTPPITFGQGTRLEIK | | | | | | |
| | CA1 | 1291 | DIVMTQTPATLSLSPGERATLSCRASQ | IGHV1-18 | IGHJ6 | IGKV3-11 | IGKJ3 | 2300 | AREGYCSGGS |
| | | | SVSSYLAWYQQKPGQAPRLLIYDASN | (Human) | (Human) | (Human) | (Human) | | CYSGYYYYYG |
| | | | RATGIPARFSGSGSGTDFTLTISSLEPE | | | | | | MDV |
| | | | DFAVYYCQQRRNWGTFGPGTKVDIK | | | | | | |
| | CB6 | 1292 | DIVMTQSPSSLSASVGDRVTITCRASQ | IGHV3-66 | IGHJ4 | IGKV1-39 | IGKJ2 | 2301 | ARVLPMYGD |
| | | | SISRYLNWYQQKPGKAPKLLIYAASSL | (Human) | (Human) | (Human) | (Human) | | YLDY |
| | | | QSGVPSRFSGSGSGTDFTLTISSLQPED | | | | | | |
| | | | FATYYCQQSYSTPPEYTFGQGTKLEIK | | | | | | |
| | CC12.1 | 1293 | DIVMTQSPSFLSASVGDRVTITCRASQ | IGHV3-53 | IGHJ6 | IGKV1-9 | IGKJ3 | 2302 | ARDLDVYGLD |
| | | | GISSYLAWYQQKPGKAPKLLIYAASTL | (Human) | (Human) | (Human) | (Human) | | V |
| | | | QSGVPSRFSGSGSGTEFTLTISSLQPED | | | | | | |
| | | | FATYYCQQLNSYPPKFTFGPGTKVEIK | | | | | | |
| | CC12.10 | 1294 | QSALTQPASVSGSPGQSLTISCTGTSSD | IGHV1-2 | IGHJ4 | IGLV2-14 | IGU3 | 2303 | ARGPRYSGTH |
| | | | VGGYNYVSWYQQHPDKAPKLMIYDV | (Human) | (Human) | (Human) | (Human) | | FDY |
| | | | NNRPSGVSNRFSGSKSGSTASLTISGL | | | | | | |
| | | | QAEDEADYYCSSYAGSSTQVFGGGTK | | | | | | |
| | | | LTVL | | | | | | |
| | CC12.11 | 1295 | QSVLTQPASVSGSPGQSITISCTGTSSD | IGHV1-2 | IGHJ4 | IGLV2-14 | IGU3 | 2304 | ARGPRYSGTY |
| | | | VGGYNYVSWYQQHPGKVPKLMIYDV | (Human) | (Human) | (Human) | (Human) | | FDY |
| | | | SNRPSGVSNRFSGSKSGNTASLTISGL | | | | | | |
| | | | QAEDEADYYCSSYTSSSAQLFGGGTKL | | | | | | |
| | | | TVL | | | | | | |
| | CC12.12 | 1296 | QSALTQPASVSGSPGQSITISCTGTSSD | IGHV1-2 | IGHJ4 | IGLV2-14 | IGU3 | 2305 | ARGPRYSGTY |
| | | | VGGYNYVSWYQQHPDKAPKLMIYDV | (Human) | (Human) | (Human) | (Human) | | FDY |
| | | | SNRPSGVSNRFSGSKSGNTASLTISGL | | | | | | |
| | | | QAEDEADYYCSSYTSGSTQVFGGGTKL | | | | | | |
| | | | TVL | | | | | | |
| | CC12.13 | 1297 | DVVMTQSPSSLSASVGDRVTITCQAS | IGHV3-53 | IGHJ4 | IGKV1-33 | IGKJ5 | 2306 | ARDPYGYSSI |
| | | | QDISNYLNWYQQKPGKAPKLLIYDAS | (Human) | (Human) | (Human) | (Human) | | WDGQGGH |
| | | | NFATGVPSRFSGTGSGTDFTFTISSLQP | | | | | | |
| | | | EDIATYYCQQYDNLPITFGQGTRLEIK | | | | | | |
| | CC12.14 | 1298 | DVVMTQSPLSLPVTLGQPASISCRSSQ | IGHV3-21 | IGHJ6 | IGKV2-30 | IGKJ3 | 2307 | ARGGYCSDGS |
| | | | SLVYSDGNTYLNWFQQRPGQSPRRLI | (Human) | (Human) | (Human) | (Human) | | CYVQDRLIYYY |
| | | | YKVSNRDSGVPDRFSGSGSGTDFTLKI | | | | | | SGLDV |
| | | | SRVEAEDVGVFYCMQGTHWPPTFGQ | | | | | | |
| | | | GTKVDIK | | | | | | |
| | CC12.15 | 1299 | QAVLTQPPSVSGAPGQRVTISCTGSSS | IGHV3-48 | IGHJ4 | IGLV1-40 | IGU3 | 2308 | ARDRRRRYCT |
| | | | NIEAGYDVHWYQQLPGTAPKLLIYVN | (Human) | (Human) | (Human) | (Human) | | NGVCYRPEEI |
| | | | SNRPSGVPDRFSGSKSGTSASLAITGL | | | | | | DY |
| | | | QAEDEADYYCQSYDSSLSGVVFGGGT | | | | | | |
| | | | KLIVL | | | | | | |
| | CC12.16 | 1300 | SYELTQPPSVSVAPGQTARITCGGNNI | IGHV3-33 | IGHJ4 | IGLV3-21 | IGU3 | 2309 | ARDPFPGAV |
| | | | GSKSVHWYQQKPGQAPVLVVYDDSD | (Human) | (Human) | (Human) | (Human) | | AGTGYLQY |
| | | | RPSGIPERFSGSNSGNTATLTISRVEAG | | | | | | |
| | | | DEADYYCQVWDSSSDPWVFGGGTKL | | | | | | |
| | | | TVL | | | | | | |
| | CC12.17 | 1301 | SYELTQPPSVSVAPGKTARITCGGNNI | IGHV3-30 | IGHJ6 | IGLV3-21 | IGU3 | 2310 | AKSSGSYYYYY |
| | | | GSKSVHWYQQKPGQAPVLVVYDDTD | (Human) | (Human) | (Human) | (Human) | | YGMDV |
| | | | RPSGIPERFSGSSSGNTATLTISRVEAG | | | | | | |
| | | | DEADYYCQVWDSSSDHPVVFGGGTK | | | | | | |
| | | | LTVL | | | | | | |
| | CC12.18 | 1302 | NFMLTQPHSVSESPGKTVTISCTRSSG | IGHV1-46 | IGHJ4 | IGLV6-57 | IGU3 | 2311 | ARLHCGGDC |
| | | | SIANNYVKWYQQRPGSSPTTVIYEDN | (Human) | (Human) | (Human) | (Human) | | YLDY |
| | | | QRPSGVPDRFSGSIDSSSNSASLTISGL | | | | | | |
| | | | KTEDEADYYCQSYDSSNHEEIWVFGG | | | | | | |
| | | | GTKLIVL | | | | | | |
| | CC12.19 | 1303 | SYELTQSPSVSVAPGQTARITCGGNNI | IGHV3-23 | IGHJ6 | IGLV3-21 | IGU3 | 2312 | AKGSGSGSYP |
| | | | GSKSVHWYQRKPGQAPVLVVYDDSD | (Human) | (Human) | (Human) | (Human) | | NYYYYYGMD |
| | | | RPSGIPERFSGSNSGNTATLTISRVEAG | | | | | | V |
| | | | DEADYYCQVWDNNSDHLVFGGGTKL | | | | | | |
| | | | TVL | | | | | | |
| | CC12.2 | 1304 | EIVMTQSPGTLSLSPGERATLSCRASQ | IGHV3-53 | IGHJ4 | IGKV3-20 | IGKJ2 | 2313 | ARDYGDLYFD |
| | | | SVSSSYLAWYQQKPGQAPRLLIYGVSS | (Human) | (Human) | (Human) | (Human) | | Y |
| | | | RATGIPDRFSGSGSETDFTLTISRLEPE | | | | | | |
| | | | EFAVYYCQQYGSSPRTFGQGTKLEIK | | | | | | |
| | CC12.20 | 1305 | QSVLTQPPSASSTPGQRVTISCSGSSSN | IGHV3-30 | IGHJ6 | IGLV1-47 | IGU3 | 2314 | AKDQAYYDIL |
| | | | IGSNYVYWYQQLPGTAPKLLIYTNNQR | (Human) | (Human) | (Human) | (Human) | | TGYLNPPKNY |
| | | | PSGVPDRFSGSKSGTSASLAISGLRSED | | | | | | YYYGMDV |
| | | | EADYYCAAWDDSLSGRVVFGGGTKLT | | | | | | |
| | | | VL | | | | | | |
| | CC12.21 | 1306 | QAVVTQPPSASGTPGQRVTISCSGSSS | IGHV1-24 | IGHJ4 | IGLV1-44 | IGU3 | 2315 | ATAFSIFGVVP |
| | | | NIGSNTVNWYQQLPGTAPKLLIYSNN | (Human) | (Human) | (Human) | (Human) | | PDY |
| | | | QRPSGVPDRFSGSKSGTSASLAISGLQ | | | | | | |
| | | | SEDEADYYCAAWDDSLNGPVFGGGT | | | | | | |
| | | | KLTVL | | | | | | |
| | CC12.23 | 1307 | SYELTQPPSVSVSPGQTARITCSGDALP | IGHV4-39 | IGHJ4 | IGLV3-25 | IGU3 | 2316 | ARQGDCSTTS |
| | | | KQYAYWYQQKPGQAPVLVIYKDSERP | (Human) | (Human) | (Human) | (Human) | | CAYDY |
| | | | SGIPERFSGSSSGTTATLTISGVQAEDE | | | | | | |
| | | | ADYYCQSADSSGTYLVVFGGGTKLAV | | | | | | |
| | CC12.24 | 1308 | DIQLTQSPSSLSASVGDRVTITCRASQS | IGHV3-30 | IGHJ6 | IGKV1-39 | IGKJ1 | 2317 | AKDRTGNYYY |
| | | | ISSYLNWYQQKPGKAPKLLIYAASNLQ | (Human) | (Human) | (Human) | (Human) | | GMDV |
| | | | SGVPSRFSGSGSGTDFTLTISSLQPEDF | | | | | | |
| | | | ATYYCQQSYSTPWTFGQGTKVEIK | | | | | | |
| | CC12.25 | 1309 | QSALTQPPSASGTPGQRVTISCSGSSS | IGHV3-23 | IGHJ5 | IGLV1-44 | IGU3 | 2318 | AKDRYYEFWS |
| | | | NIGSNTVNWYQQLPGTAPKVLVYSND | (Human) | (Human) | (Human) | (Human) | | GYSNWFDP |
| | | | QRPSGVPDRFSGSKSGTSASLAISGLQ | | | | | | |
| | | | SEDEADYYCAAWDDSLNGPVFGGGT | | | | | | |
| | | | KLTVL | | | | | | |
| | CC12.26 | 1310 | QTVVTQEPSLTVSPGGTVTLTCVSSTG | IGHV5-51 | IGHJ4 | IGLV7-43 | IGU3 | 2319 | ARVNYYDSSG |
| | | | AVTSGYYPNWFQQKPGQAPRALIYST | (Human) | (Human) | (Human) | (Human) | | YPSFHFDY |
| | | | SKKHSWTPARFSGSLLGGKAALTLSGV | | | | | | |
| | | | QPEDEAEYYCLLYYGGAQRWVFGGG | | | | | | |
| | | | TKLTVL | | | | | | |
| | CC12.27 | 1311 | QSVLTQPASVSGSPGQSITISCTGTSSD | IGHV1-2 | IGHJ6 | IGLV3-23 | IGU1 | 2320 | AREMPAAM |
| | | | VGSYNLVSWYQQHPGKAPKLMIYEGS | (Human) | (Human) | (Human) | (Human) | | GYYYYGMDV |
| | | | KRPSGVSNRFSGSKSGNTASLTISGLQ | | | | | | |
| | | | AEDEADYYCYSYAGSSTFVFVFGTGTK | | | | | | |
| | | | VIVL | | | | | | |
| | CC12.28 | 1312 | QSALTQPPSASGTPGQRVTISCSGSSS | IGHV3-23 | IGHJ4 | IGLV1-47 | IGU3 | 2321 | AKANKYSSSE |
| | | | NIGSNYVYWYQQLPGAAPKLLIYRND | (Human) | (Human) | (Human) | (Human) | | FDF |
| | | | QRPSGVPDRFSGSKSGTSVSLAISGLRS | | | | | | |
| | | | EDEADYYCAAWDDSLSGWVFGGGTK | | | | | | |
| | | | LTVL | | | | | | |
| | CC12.3 | 1313 | EIVLTQSPGTLSLSPGERATLSCRASQS | IGHV3-53 | IGHJ4 | IGKV3-20 | IGKJ2 | 2322 | ARDFGDFYFD |
| | | | VSSYLAWYQQKPGQAPRLLIYGASSRA | (Human) | (Human) | (Human) | (Human) | | Y |
| | | | TGIPDRFSGSGSGTDFTLTISRLEPEDF | | | | | | |
| | | | AVYYCQQYGSSPRTFGQGTKLEIK | | | | | | |
| | CC12.4 | 1314 | QSVLTQPPSASGSPGQSVTISCTGTSS | IGHV1-2 | IGHJ3 | IGLV2-8 | IGU3 | 2323 | ATESWVYGS |
| | | | DVGGYDYVSWYQQHPGKAPKLMIYE | (Human) | (Human) | (Human) | (Human) | | GSYSSGAFDI |
| | | | VSKRPSGVPDRFSGSKSGNTASLTVPG | | | | | | |
| | | | LQAEDEADYYCTSYAGSNNFVFGGGT | | | | | | |
| | | | KLIVL | | | | | | |
| | CC12.5 | 1315 | QTVVTQPASVSGSPGQSITISCTGTSSD | IGHV1-2 | IGHJ4 | IGLV2-14 | IGU3 | 2324 | ARGPRYSGTY |
| | | | VGGYNYVSWYQQHPDKAPKLIIYDVS | (Human) | (Human) | (Human) | (Human) | | FDY |
| | | | NRPSGVSNRFSGSKSGNTASLTISGLQ | | | | | | |
| | | | AEDEAAYYCSSYTSSSTQVFGGGTKLT | | | | | | |
| | | | VL | | | | | | |
| | CC12.6 | 1316 | QSALTQPTSVSGSPGQSITISCTGTSSD | IGHV1-2 | IGHJ4 | IGLV2-14 | IGU3 | 2325 | ARGPRYSGTY |
| | | | VGGYNYVSWYQQHPGKAPKLIIYDVS | (Human) | (Human) | (Human) | (Human) | | FDY |
| | | | NRPSGVSNRFSGSKSGNTASLTISGLQ | | | | | | |
| | | | AEDEADYYCSSYTVSSTQVFGGGTKLT | | | | | | |
| | | | VL | | | | | | |
| | CC12.7 | 1317 | QPVLTQPASVSGSPGQSLTISCTGTSS | IGHV1-2 | IGHJ4 | IGLV2-14 | IGU3 | 2326 | ARGPRYSGTY |
| | | | DIGGFNYVSWYQQHPGKAPKLMIFD | (Human) | (Human) | (Human) | (Human) | | FDY |
| | | | VSKRPSGVPNRFSGSKSGNTASLTISGL | | | | | | |
| | | | QAEDEGDYYCSSYTISSAQVFGGGTKL | | | | | | |
| | | | TVL | | | | | | |
| | CC12.8 | 1318 | QSALTQPASVSGSPGQSITISCTGTSSD | IGHV1-2 | IGHJ4 | IGLV2-14 | IGU3 | 2327 | ARGPRYSGTY |
| | | | VGGYNHVSWYQQHPGKAPKLMIYDV | (Human) | (Human) | (Human) | (Human) | | FDY |
| | | | SNRPSGVSNRFSGSKSGNTASLTISGL | | | | | | |
| | | | QAEDEADYYCSSYTSSSAQLFGGGTKL | | | | | | |
| | | | TVL | | | | | | |
| | CC12.9 | 1319 | QSVLTQPASVSGSPGQSITISCTGTSSD | IGHV1-2 | IGHJ4 | IGLV2-14 | IGU3 | 2328 | ARGPRYSGTY |
| | | | VGGYNYVSWYQQHPGKVPKLMIYDV | (Human) | (Human) | (Human) | (Human) | | FDY |
| | | | SNRPSGVSNRFSGSKSGNTASLTISGL | | | | | | |
| | | | QAEDEADYYCSSYTSSSAQVFGGGTKL | | | | | | |
| | | | TVL | | | | | | |
| | CC6.29 | 1320 | DIQLTQSPSSLSASVGDRVTITCRASQT | IGHV7-4- | IGHJ5 | IGKV1-39 | IGKJ3 | 2329 | AVYYYDSGSP |
| | | | ASSYLNWYQQKPGKAPNLLIYAASSLQ | 1 | (Human) | (Human) | (Human) | | GWFDP |
| | | | SGVPSRFSGSGSVTDFTLTISSLQPEDF | (Human) | | | | | |
| | | | ATYYCQQSYSTPPTFGQGTKVDIK | | | | | | |
| | CC6.30 | 1321 | DIQMTQSPSSLSASVGDRVTITCRASQ | IGHV1-69 | IGHJ5 | IGKV1-39 | IGKJ3 | 2330 | ARDFRYCSST |
| | | | NISSYLNWYQQEAGKAPKLLIYAASSL | (Human) | (Human) | (Human) | (Human) | | RCYFWFDP |
| | | | QSGVPSRFSGSGSGTDFTLTISSLQPED | | | | | | |
| | | | FATYYCQQSYSTPRTFGQGTKVDIK | | | | | | |
| | CC6.31 | 1322 | DIQMTQSPSSLSASVGDRVTITCRASQ | IGHV1-46 | IGHJ4 | IGKV1-17 | IGKJ4 | 2331 | ARWYDSTGSI |
| | | | GIRNDLGWYQQKPGKAPKRLIYAASSL | (Human) | (Human) | (Human) | (Human) | | DY |
| | | | QSGVPSRFSGSGSGTEFTLTISSLQPED | | | | | | |
| | | | FATYYCLQHNSYPILTFGGGTKLEIK | | | | | | |
| | CC6.32 | 1323 | QLVLTQPPSVSVAPGKTARITCGGNNI | IGHV3-9 | IGHJ4 | IGLV3-21 | IGU6 | 2332 | AKDQGYSYG |
| | | | GSKSVYWYQQKPGQAPVLVVYDDSD | (Human) | (Human) | (Human) | (Human) | | NYFDY |
| | | | RPSGIPERFSGSNSGNTATLTISRVEAG | | | | | | |
| | | | DEADYYCQVWDSSSDHPYVFGSGTKV | | | | | | |
| | | | TVL | | | | | | |
| | CC6.33 | 1324 | EIVLTQSPGTLSLSPGERATLSCRASQS | IGHV1-69 | IGHJ4 | IGKV3-20 | IGKJ1 | 2333 | ALRNQWDLL |
| | | | VSSSYLAWYQQKPGQAPRLLIYGASSR | (Human) | (Human) | (Human) | (Human) | | VY |
| | | | ATGIPDRFSGSGSGTDFTLTISRLEPED | | | | | | |
| | | | FAVYYCQHYGSSLWTFGQGTKLEIK | | | | | | |
| | Clone11- | 1325 | DVLMTQTPLSLPVSLGDQASISCRSSQ | IGHV1-69 | IGHJ3 | IGKV1-117 | IGKJ5 | 2334 | ARRGYGSSYT |
| | 9 | | SIVHSNGNTYLEWYLQKPGQSPKLLIY | (Mouse) | (Mouse) | (Mouse) | (Mouse) | | WFAY |
| | | | KVSNRFSGVPDRFSGSGSGTDFTLKIS | | | | | | |
| | | | RVEAEDLGVYYCFQGSHVPLTFGAGT | | | | | | |
| | | | KLELK | | | | | | |
| | CnC2t1p1_ | 1326 | EIVLTQSPATLSLSPGERATLSCRASQS | IGHV1-69 | IGHJ4 | IGKV3-11 | IGKJ4 | 2335 | ARVSGYDSSG |
| | B10 | | VSSYLAWYQQKPGQAPRLLIYDASNR | (Human) | (Human) | (Human) | (Human) | | YWGDY |
| | | | ATGIPARFSGSGSGTDFTLTISSLEPED | | | | | | |
| | | | FAVYYCQQRSNWPPALTFGGGTKVEIK | | | | | | |
| | CnC2t1p1_ | 1327 | QSALTQPASVSGSPGQSITISCTGTSSD | IGHV1-18 | IGHJ5 | IGLV2-23 | IGU3 | 2336 | ARDGELLGW |
| | B4 | | VGSYNLVSWYQQHPGKAPKLMIYEGS | (Human) | (Human) | (Human) | (Human) | | FDP |
| | | | KRPSGVSNRFSGSKSGNTASLTISGLQ | | | | | | |
| | | | AEDEADYYCCSYAGSSTWVFGGGTKL | | | | | | |
| | | | TVL | | | | | | |
| | CnC2t1p1_ | 1328 | DIVMTQSPLSLPVTPGEPASISCRSSQS | IGHV3-49 | IGHJ6 | IGKV2-28 | IGKJ3 | 2337 | TRVRRLWFGS |
| | D6 | | LLHSNGYNYLDWYLQKPGQSPQLLIYL | (Human) | (Human) | (Human) | (Human) | | YYYGMDV |
| | | | GSNRASGVPDRFSGSGSGTDFTLKISR | | | | | | |
| | | | VEAEDVGVYYCMQALQTPGTFGPGT | | | | | | |
| | | | KVDIK | | | | | | |
| | CnC2t1p1_ | 1329 | DIVMTQSPLSLPVTPGEPASISCRSSQS | IGHV3-49 | IGHJ6 | IGKV2-28 | IGKJ3 | 2338 | TRVRRLWFGS |
| | E12 | | LLHSNGYNYLDWYLQKPGQSPQLLIYL | (Human) | (Human) | (Human) | (Human) | | YYYGMDV |
| | | | GSNRASGVPDRFSGSGSGTDFTLKISR | | | | | | |
| | | | VEAEDVGVYYCMQALQTPGTFGPGT | | | | | | |
| | | | KVDIK | | | | | | |
| | CnC2t1p1_ | 1330 | QSALTQPASVSGSPGQSITISCTGTSGD | IGHV1-2 | IGHJ4 | IGLV2-23 | IGU3 | 2339 | ARASVSTITDF |
| | E8 | | VGSYNLVSWYQQHPGKAPKLVIYEAT | (Human) | (Human) | (Human) | (Human) | | DY |
| | | | KRPSGVSNRFFASKSGNTASLTISGLQ | | | | | | |
| | | | AEDEADYYCCSYAGVRTVVFGGGTKL | | | | | | |
| | | | TVL | | | | | | |
| | CnC2t1p1_ | 1331 | QSALTQPASVSGSPGQSITISCTGTSGD | IGHV1-2 | IGHJ4 | IGLV2-23 | IGU3 | 2340 | ARASVATITDF |
| | G6 | | IGSYNLVSWYQQYPGKAPKLIIYEASKR | (Human) | (Human) | (Human) | (Human) | | DY |
| | | | PSGVSNRFFASKSGNTASLTISGLQAE | | | | | | |
| | | | DEADYYCCSYAGVRTVVFGGGTKLTVL | | | | | | |
| | COV2- | 1332 | EIVLTQSPGTLSLSPGERATLSCRASQS | IGHV3- | IGHJ4 | IGKV3-20 | IGKJ1 | 2341 | ARPQSGGYYA |
| | 2006 | | VSSSYLAWYQQKPGQAPRLLIYGASSR | 303 | (Human) | (Human) | (Human) | | PLDY |
| | | | ATGIPDRFSGSGSGTDFTLTISRLEPED | (Human) | | | | | |
| | | | FAVYYCQQYGSSPWTFGQGTKVEIK | | | | | | |
| | COV2- | 1333 | DIQMTQSPSSLSASVGDRVTITCQASQ | IGHV3-30 | IGHJ6 | IGKV1-33 | IGKJ3 | 2342 | AKVSATYYYYY |
| | 2007 | | DISTYLNWYQQKPGKAPKLLIYDASNL | (Human) | (Human) | (Human) | (Human) | | YGMDV |
| | | | ETGVPSRFSGSGSGTDFTFTISSLQPED | | | | | | |
| | | | IATYYCQQYDNLLFTFGPGTKVDVK | | | | | | |
| | COV2- | 1334 | QSALTQPASVSGSPGQSITISCTGTSGD | IGHV3-30 | IGHJ4 | IGLV2-14 | IGU3 | 2343 | ARDTATYVLL |
| | 2009 | | VGAYNYVSWYQQHPVKAPKLMIYDV | (Human) | (Human) | (Human) | (Human) | | WSGDFNLDY |
| | | | SKRPSGVSNRFSGSKSGNTASLTISGLQ | | | | | | |
| | | | TEDEADYYCSSYTSSSTLWVFGGGTKL | | | | | | |
| | | | TVL | | | | | | |
| | COV2- | 1335 | ITCRASQSISSYLNWYQQKPGKAPKLLI | IGHV3- | IGHJ6 | IGKV1-39 | IGKJ3 | 2344 | ARGHTGNYYY |
| | 2011 | | YAASSLQSGVPSRFGGSASGTDFTLTIS | 303 | (Human) | (Human) | (Human) | | GMDV |
| | | | SLQPEDFATYYCQQSYSTFTFGPGTKV | (Human) | | | | | |
| | | | DIK | | | | | | |
| | COV2- | 1336 | DIVMTQSPDFLAVSLGERATINCKSSQ | IGHV3-30 | IGHJ4 | IGKV4-1 | IGKJ4 | 2345 | AKGGDSSGW |
| | 2013 | | SVLHTPKNKNYLAWYKQKPGQPPKVL | (Human) | (Human) | (Human) | (Human) | | AWDGDNPPT |
| | | | IYWASTRESGVPERFSGSGSGTDFTLII | | | | | | DY |
| | | | SSLQAEDAAVYYCQQYYTAPLTFGGG1 | | | | | | |
| | | | KVEIK | | | | | | |
| | COV2- | 1337 | EIVLTQSPATLSLSPGERATLSCRASQS | IGHV3-9 | IGHJ4 | IGKV3-11 | IGKJ2 | 2346 | AMGPFGELLP |
| | 2015 | | VSSYLAWYQQKPGQAPRLLIYDTSNR | (Human) | (Human) | (Human) | (Human) | | YYFDY |
| | | | ATGIPARFSGSGSGTDFTLTISSLEPED | | | | | | |
| | | | FAVYYCQQRSNWPPYTFGQGTKLEIK | | | | | | |
| | COV2- | 1338 | QSALTQPASVSGSPGQSITISCTGTSSD | IGHV1-24 | IGHJ5 | IGLV2-14 | IGU3 | 2347 | AAAPAVMTA |
| | 2016 | | VGGYHYVSWYQHHPGKAPKLIIYDVIK | (Human) | (Human) | (Human) | (Human) | | GWFDP |
| | | | RPSGVSNRFSGSKSGNTASLTISGLQA | | | | | | |
| | | | EDEAYYYCSSYTSSTTWVFGGGTRLTV | | | | | | |
| | | | L | | | | | | |
| | COV2- | 1339 | QSVLTQPPSVSGAPGQRVTISCTGSSS | IGHV4-59 | IGHJ5 | IGLV1-40 | IGU1 | 2348 | VRGAMAWF |
| | 2017 | | NIGAGYNVHWYQQLPGTAPKLLIYGN | (Human) | (Human) | (Human) | (Human) | | DP |
| | | | NNRPSGVPDRFSGSKSGTSASLAITGL | | | | | | |
| | | | QAEDEADYYCQSFDSSLSGSDVFGTGT | | | | | | |
| | | | KVSVL | | | | | | |
| | COV2- | 1340 | QSVLTQPPSASGTPGQRVTISCSGSSS | IGHV1-24 | IGHJ4 | IGLV1-47 | IGU2 | 2349 | ATQPAAIGGT |
| | 2021 | | NIGSNYVYWYQQLPGTAPKLLIYRNN | (Human) | (Human) | (Human) | (Human) | | PPYY |
| | | | QRPSGVPDRFSGSKSGTSASLAISGLRS | | | | | | |
| | | | EDEADYYCAAWDASLSGHVVFGGGT | | | | | | |
| | | | KLTVL | | | | | | |
| | COV2- | 1341 | DIVMAQTPLSLPVTPGEPASISCRSSQS | IGHV1-18 | IGHJ6 | IGKV2-40 | IGKJ2 | 2350 | ARDQGPTYYY |
| | 2022 | | LLDSDDGNTYFDWYLQKPGQSPQLLI | (Human) | (Human) | (Human) | (Human) | | GSGSPHYGM |
| | | | YTLSYRASGVPDRFSGSGSGTDFTLKIN | | | | | | DV |
| | | | RVEAEDVGVYYCMQRIEFPWTFGQG | | | | | | |
| | | | TKLEIK | | | | | | |
| | COV2- | 1342 | DIVMTQSPDFLAVSLGERATINCKSSQ | IGHV3-30 | IGHJ4 | IGKV4-1 | IGKJ4 | 2351 | AKGGDSSGW |
| | 2025 | | SVLHTPKNKNYLAWYKQKPGQPPKVL | (Human) | (Human) | (Human) | (Human) | | AWDGDNPPT |
| | | | IYWASTRESGVPERFSGSGSGTDFTLII | | | | | | DY |
| | | | SSLQAEDAAVYYCQQYYTAPLTFGGG1 | | | | | | |
| | | | KVEIK | | | | | | |
| | COV2- | 1343 | DIQMTQSPSSLSASVGDRVTITCRASQ | IGHV1-24 | IGHJ6 | IGKV1-16 | IGKJ1 | 2352 | ATSFPIRGDPS |
| | 2026 | | GITNYLAWFQQKPGKAPKSLIYAVSSL | (Human) | (Human) | (Human) | (Human) | | YYYYYYGMDV |
| | | | QSGVPSKFSGSGSGTDFTLTISSLQPED | | | | | | |
| | | | FATYYCQQYNSYPWTFGQGTKVEIK | | | | | | |
| | COV2- | 1344 | SYELTQPPSVSVSPGQTARITCSGDALP | IGHV3-30 | IGHJ6 | IGLV3-25 | IGU3 | 2353 | AIYGYYYYGLD |
| | 2027 | | KQYAYWYQQKPGQAPVLVIYKDSERP | (Human) | (Human) | (Human) | (Human) | | V |
| | | | SGIPERFSGSSSGTTVTLTISGVQAEDE | | | | | | |
| | | | ADYYCQSADSSGTYFWVFGGGTKLTV | | | | | | |
| | | | L | | | | | | |
| | COV2- | 1345 | DIVMTQSPDFLAVSLGERATINCKSSQ | IGHV3-30 | IGHJ4 | IGKV4-1 | IGKJ4 | 2354 | AKGGDSSGW |
| | 2028 | | SVLHTPKNKNYLAWYKQKPGQPPKVL | (Human) | (Human) | (Human) | (Human) | | AWDGDNPPT |
| | | | IYWASTRESGVPERFSGSGSGTDFTLII | | | | | | DY |
| | | | SSLQAEDAAVYYCQQYYTAPLTFGGG1 | | | | | | |
| | | | KVEIK | | | | | | |
| | COV2- | 1346 | QSVLTQPPSVSGTPGQRVTISCSGSNS | IGHV4-4 | IGHJ3 | IGLV1-44 | IGU3 | 2355 | ARPTAGAGG |
| | 2029 | | KIGSYSVNWYQQLPGTAPKLLIYRNNQ | (Human) | (Human) | (Human) | (Human) | | AFDI |
| | | | RPSGVPDRFFGSKSGTSASLAISGLQSE | | | | | | |
| | | | DEADYYCSVWDDSLNGPLFGGGTKLT | | | | | | |
| | | | FV | | | | | | |
| | COV2- | 1347 | SYELTQPPSVSVSPGQTARITCSGDAW | IGHV2-26 | IGHJ5 | IGLV3-25 | IGU3 | 2356 | ARTEWLLSDN |
| | 2031 | | PNQYAYWYQQKPGQAPVLVIYKDTER | (Human) | (Human) | (Human) | (Human) | | WFDS |
| | | | PSGIPERFSGSSSGTTVTLTISGVQAED | | | | | | |
| | | | EADYFCQSSDSSGVVFGGGTKLTVL | | | | | | |
| | COV2- | 1348 | DIQMTQSPSTLSASVGDRVTITCRASQ | IGHV1-46 | IGHJ3 | IGKV1-5 | IGKJ1 | 2357 | ARGGLVPAA |
| | 2032 | | SISSWLAWYQQKPGKAPKLLIYKASSL | (Human) | (Human) | (Human) | (Human) | | RNAFDI |
| | | | ESGVPSRFSGSGSGTEFTLTISSLQPDD | | | | | | |
| | | | FATYYCQQYNSYSWTFGQGTKVEIK | | | | | | |
| | COV2- | 1349 | QSVLTQPPSASGTPGQRVTISCSGSNS | IGHV4-4 | IGHJ3 | IGLV1-44 | IGU3 | 2358 | ARPTAGAGG |
| | 2033 | | KIGSYSVNWYQQLPGTAPKLLIYRNNQ | (Human) | (Human) | (Human) | (Human) | | AFDT |
| | | | RPSGVPDRFSGSKSGTSASLAISGLQSE | | | | | | |
| | | | DEADYYCSVWDDSLNGPLFGGGTKLT | | | | | | |
| | | | FL | | | | | | |
| | COV2- | 1350 | DIQMTQSPSSLSASVGDRVTITCRASQ | IGHV1-18 | IGHJ5 | IGKV1-39 | IGKJ4 | 2359 | ARDLPIKVVV |
| | 2034 | | SISSYLNWYQQKPGKAPKLLIYAASSLQ | (Human) | (Human) | (Human) | (Human) | | PAADYNWFD |
| | | | SGVPSRFSGSGSGTDFTLTISSLQPEDF | | | | | | P |
| | | | ATYYCQQSYSTPPTFGGGTKVQIK | | | | | | |
| | COV2- | 1351 | DIQMTQSPSSLSASVGDRVTITCRASQ | IGHV2-5 | IGHJ3 | IGKV1-39 | IGKJ1 | 2360 | AHRRGILTED |
| | 2035 | | SISSYLNWYQQRPGKAPKLLIYAASSLQ | (Human) | (Human) | (Human) | (Human) | | AFDI |
| | | | SGVPSRFSGSGYGTDFTLTISSLQPEDF | | | | | | |
| | | | ATYYCQQSYNTPRTFGQGTKVEIK | | | | | | |
| | COV2- | 1352 | DIQMTQSPSSVSASVGDRVTITCRASQ | IGHV3-53 | IGHJ6 | IGKV1-12 | IGKJ5 | 2361 | ARDLNEHGL |
| | 2037 | | GISSWLAWYQQKPGKAPKLLIYAASSL | (Human) | (Human) | (Human) | (Human) | | DV |
| | | | QSGVPSRFSGSGSGTDFTLTISSLQPED | | | | | | |
| | | | FATYYCQQTNSFPTFGQGTRLEIR | | | | | | |
| | COV2- | 1353 | EIVLTQSPGTLSLSPGERATLSCRASQS | IGHV1-46 | IGHJ3 | IGKV3-20 | IGKJ3 | 2362 | ARGTLIPAHR |
| | 2039 | | VSSSFLAWYQQKPGQAPRLLIYGASN | (Human) | (Human) | (Human) | (Human) | | GAFDI |
| | | | RATGIPDRFSGSGSGTDFTLTISRLEPE | | | | | | |
| | | | DFAVYYCQQYGNSPQFGPGTKVDIK | | | | | | |
| | COV2- | 1354 | DIQMTQSPSSLSASVGDRVTITCRASQ | IGHV4-61 | IGHJ6 | IGKV1-5 | IGKJ1 | 2363 | ARARPDYYYY |
| | 2041 | | SISNWLAWYQQKPGKAPKLLIYKASSL | (Human) | (Human) | (Human) | (Human) | | YAMDV |
| | | | ESGVPSRFSGSGSGTEFTLTISSLQPDD | | | | | | |
| | | | FATYYCQQYNSYSTWTFGQGTKVEIK | | | | | | |
| | COV2- | 1355 | DIQMTQSPSSLSASVGDRVTITCRASQ | IGHV3-9 | IGHJ6 | IGKV1-39 | IGKJ2 | 2364 | AKAHSTGHQ |
| | 2046 | | SISSFLNWYQQKPGKAPKLLIYAAFNL | (Human) | (Human) | (Human) | (Human) | | YYYGMDV |
| | | | QSGVPSRFSGSGSGTDFTLTISSLQSED | | | | | | |
| | | | FATYYCQQSYNTPYTFGQGTKLEIK | | | | | | |
| | COV2- | 1356 | QSVLTQPPSASGTPGQRVIISCSGSSSN | IGHV1-2 | IGHJ4 | IGLV1-44 | IGU2 | 2365 | ARVVVLGYGR |
| | 2050 | | IGSNTVKWYHQLPGTAPKLLICSNNQR | (Human) | (Human) | (Human) | (Human) | | PNNYYDGRN |
| | | | PSGVPDRFSGSKSDTSASLAISGLQSED | | | | | | VWDY |
| | | | EADYYCAAWDDSLNALVFGGGTKLTV | | | | | | |
| | | | L | | | | | | |
| | COV2- | 1357 | DIQMTQSPSSLSASVGDRVTITCRASQ | IGHV2-70 | IGHJ4 | IGKV1-39 | IGKJ5 | 2366 | ARGVVTYDY |
| | 2051 | | SIAGYLNWYQQKPGKAPKLLIYGTTSL | (Human) | (Human) | (Human) | (Human) | | |
| | | | QSGVPVRFSGSGSGTDFTLTISSLQPE | | | | | | |
| | | | DFATYYCQQSYSTPGTFGQGTRLEIK | | | | | | |
| | COV2- | 1358 | DIQMTQSPSSLSASVGDRVTITCQASQ | IGHV1-69 | IGHJ6 | IGKV1-33 | IGKJ2 | 2367 | ARGRGYSNY |
| | 2054 | | DINHYLNWYQQKPGKAPKLLIYDASN | (Human) | (Human) | (Human) | (Human) | | GASYYMDV |
| | | | LETGVPSRFSGSGSGTDFTFTITSLQPE | | | | | | |
| | | | DVATYYCQQSDNLPMYTFGQGTKLEI | | | | | | |
| | | | K | | | | | | |
| | COV2- | 1359 | SYVLTQPPSVSVAPGKTARITCEGNNI | IGHV3-9 | IGHJ6 | IGLV3-21 | IGU2 | 2368 | AKGRGAGYTS |
| | 2055 | | GSKSVHWYQQKPGQAPVLVVYDDSG | (Human) | (Human) | (Human) | (Human) | | YMDV |
| | | | RPSGIPERFSGSNSGNTATLTISRVEAG | | | | | | |
| | | | DEADYFCQVWDSSSDHHVVFGGGTK | | | | | | |
| | | | LTVL | | | | | | |
| | COV2- | 1360 | QSVLTQPPSASGTPGQRVTISCSGSNS | IGHV1-8 | IGHJ4 | IGLV1-44 | IGU2 | 2369 | ARMRTGWPT |
| | 2064 | | NIGSYTVNWYQQFPGTAPKLLIYDNN | (Human) | (Human) | (Human) | (Human) | | HGRPDDF |
| | | | QRTSGVPDRFSGSKSGTSASLAISGLQ | | | | | | |
| | | | SEDEANYYCLVWDDSLNGLVFGGGTK | | | | | | |
| | | | LTVL | | | | | | |
| | COV2- | 1361 | QSVLTQPPSVSGAPGQRVTISCTGSSS | IGHV3-53 | IGHJ3 | IGLV1-40 | IGU2 | 2370 | ARSYDILTGYR |
| | 2068 | | NIGSGSDVHWYQQLPGTAPKLLIYGN | (Human) | (Human) | (Human) | (Human) | | DAFDI |
| | | | TNRPSGVPDRFSGSKSGTSASLAITGL | | | | | | |
| | | | QAEDEADYYCQSYDSRLSGFVVFGGG | | | | | | |
| | | | TKLTVL | | | | | | |
| | COV2- | 1362 | DIQMTQSPSSLSASVGDRVTITCRASQ | IGHV4-34 | IGHJ6 | IGKV1-39 | IGKJ4 | 2371 | ARVGYSQGYY |
| | 2070 | | SISNYLNWYQQKPGKAPKLLIYAASSL | (Human) | (Human) | (Human) | (Human) | | YYYMDV |
| | | | QSGVPSRFSGSGSGTDFSLTISSLQPED | | | | | | |
| | | | FATYSCQQSYTTLLTFGGGTKVEIK | | | | | | |
| | COV2- | 1363 | EIVLTQSPGTLSLSPGERATLSCRASQS | IGHV1-58 | IGHJ3 | IGKV3-20 | IGKJ1 | 2372 | AAPHCSRTSC |
| | 2072 | | VSSSYLGWYQQKPGQAPRLLIYGASSR | (Human) | (Human) | (Human) | (Human) | | YDAFDL |
| | | | ATGIPDRFSGSGSGTDFTLTISRLEPED | | | | | | |
| | | | FAVYYCQQYGSSPWTFGQGTKVEIK | | | | | | |
| | COV2- | 1364 | QSVLTQPPSVSGAPGQRVTLSCTGSSS | IGHV1-69 | IGHJ2 | IGLV1-40 | IGU3 | 2373 | ARVGVSGFKS |
| | 2078 | | SIGAGYDVHWYQQLPGTAPKLLIYGS | (Human) | (Human) | (Human) | (Human) | | GSSWYFDL |
| | | | SSRPSGVPDRFSGSKSGTSASLAITGL | | | | | | |
| | | | QAEDEADYYCQSYDSSLSDSVFGGGT | | | | | | |
| | | | KVTVL | | | | | | |
| | COV2- | 1365 | DIQLTQSPSFLSASVGDRVTITCRASQG | IGHV3-66 | IGHJ6 | IGKV1-9 | IGKJ5 | 2374 | ARDLVTYGLD |
| | 2080 | | ISSYLAWYQQKPGTAPSLLIYAASTLQ | (Human) | (Human) | (Human) | (Human) | | V |
| | | | SGVPSRFSGSGSGTEFTLTISSLQPEDF | | | | | | |
| | | | ATYYCQLLSSHPLTFGQGTRLEIK | | | | | | |
| | COV2- | 1366 | SSELTQDPAVSVALGQTVRITCQGDSL | IGHV3-20 | IGHJ3 | IGLV3-19 | IGU3 | 2375 | AVIMSPIPRYS |
| | 2082 | | RSYYASWYQQKPGQVPILVIYDKSSR | (Human) | (Human) | (Human) | (Human) | | GYDWAGGAF |
| | | | PSGIPDRFSGSSSGSTASLTITGAQAED | | | | | | DI |
| | | | EADYYCSSRDSSGSAVVFGGGTKLTV | | | | | | |
| | | | L | | | | | | |
| | COV2- | 1367 | DIQMTQSPSSLSASVGDRVTITCQASQ | IGHV3-30 | IGHJ4 | IGKV1-33 | IGKJ3 | 2376 | AKSLGPYCSG |
| | 2083 | | DISSYLSWYQQKPGKAPKLLIYDASSL | (Human) | (Human) | (Human) | (Human) | | GTCYSLVGDY |
| | | | ETGVPSRFSGSGSGTDFTFTISSLQPED | | | | | | |
| | | | IATYYCQQYASLPFTFGPGTKVDIK | | | | | | |
| | COV2- | 1368 | SSELTQDPAVSVALGQTVRITCQGDSL | IGHV3-20 | IGHJ3 | IGLV3-19 | IGU2 | 2377 | AVIMSPIPRYS |
| | 2094 | | RSYYASWYQQKPGQVPILVIYDKSSR | (Human) | (Human) | (Human) | (Human) | | GYDWAGDAF |
| | | | PSGIPDRFSGSSSGSTASLTITGAQAED | | | | | | DI |
| | | | EADYYCSSRDSSGSAVVFGGGTKLTV | | | | | | |
| | | | L | | | | | | |
| | COV2- | 1369 | QSVLTQAPSASGTPGQRVTISCSGSSS | IGHV1-8 | IGHJ4 | IGLV1-44 | IGU2 | 2378 | ARMRSGWPT |
| | 2096 | | SIGSYTISWYQQLPGTAPKLLIYGSDQ | (Human) | (Human) | (Human) | (Human) | | HGRPDDF |
| | | | RTSGVPDRFSGSKFGTSASLAISGLQSE | | | | | | |
| | | | DESSYYCAVWDDSLSGLVFGGGTKL | | | | | | |
| | | | TVL | | | | | | |
| | COV2- | 1370 | DIQMTQSPSSLSASVGDRVTITCRASQ | IGHV3-9 | IGHJ6 | IGKV1-39 | IGKJ1 | 2379 | AKDIIRQGED |
| | 2097 | | SIASYLSWYQQKPGKAPKLLIYAASSL | (Human) | (Human) | (Human) | (Human) | | GMDV |
| | | | QSGVPSRFSGSGSGTDFTLTISSLQPEE | | | | | | |
| | | | FATYYCQQSYSTPWTFGQGTKVEIK | | | | | | |
| | COV2- | 1371 | DIVMTQSPATLSVSPGERAILSCRASQ | IGHV3-23 | IGHJ3 | IGKV3-15 | IGKJ1 | 2380 | VKGLFDWFPL |
| | 2098 | | SVRSSLAWYQQKPGQAPRLLISGAST | (Human) | (Human) | (Human) | (Human) | | |
| | | | RATAIPARFSGSGSGTEFTLTITSLQSE | | | | | | |
| | | | DCAVYYCHQYSSWPQTFGQGTKVEIK | | | | | | |
| | COV2- | 1372 | SFMLTQPHSVSESPGKTVTISCTGSSG | IGHV3-7 | IGHJ4 | IGLV6-57 | IGU3 | 2381 | ARLGFYYGGA |
| | 2103 | | SIASSYVQWYQQRPGSAPTTVISEDS | (Human) | (Human) | (Human) | (Human) | | DY |
| | | | QRPSGVPDRFSGSIDSSSSSASLTISGL | | | | | | |
| | | | KTEDEADYYCQSYDGISRAWVFGGGT | | | | | | |
| | | | KLTVL | | | | | | |
| | COV2- | 1373 | DIVMTQSPLSLPVTPGEPASISCRSSQS | IGHV3-9 | IGHJ4 | IGKV2-28 | IGKJ5 | 2382 | AKGVDYGGK |
| | 2108 | | LLHSLGYSSLSWYLQKPGQSPHLLIYL | (Human) | (Human) | (Human) | (Human) | | LAYFDS |
| | | | GSSRASGVPDRFSGSGSATDFTLKISR | | | | | | |
| | | | LEAEDVGVYYCMQALQTPLTFGQGTR | | | | | | |
| | | | LEIK | | | | | | |
| | COV2- | 1374 | DIQMTQSPSSLSACVGDRVTITCRASQ | IGHV3- | IGHJ4 | IGKV1-39 | IGKJ5 | 2383 | ARDIDSGYDP |
| | 2110 | | SISSYLSWYQQKPGKGPKLLIYAASSLQ | 303 | (Human) | (Human) | (Human) | | TPVFDY |
| | | | SGVPSRFSGSGSGTDFTLTISSLQPEDF | (Human) | | | | | |
| | | | ATYYCQQSYSSLSITFGQGTRLEIK | | | | | | |
| | COV2- | 1375 | DIQMTQSPSSLSASVGDRVTITCRASQ | IGHV3-13 | IGHJ5 | IGKV1-39 | IGKJ1 | 2384 | ARVLYDSSGF |
| | 2111 | | SISSYLSWYQQKPGKAPKLLIYAASSLE | (Human) | (Human) | (Human) | (Human) | | YSWFDP |
| | | | SGVPSRFSGSGSGTDFTLTISSLQPEDF | | | | | | |
| | | | ATYYCQQSYEIPPWTFGQGTKVEIK | | | | | | |
| | COV2- | 1376 | DIQMTQSPSSLSASVGDRVTITCQASQ | IGHV3-53 | IGHJ5 | IGKV1-33 | IGKJ4 | 2385 | ARDFLRWHD |
| | 2113 | | DISSYLSWYQQKPGKAPKLLIYDASS | (Human) | (Human) | (Human) | (Human) | | L |
| | | | LETGVPLRFSGSGSGTDFIFTISSLQPE | | | | | | |
| | | | DIATYYCQQYDSLPPVFGGGTKVEIK | | | | | | |
| | COV2- | 1377 | QSVLTQPPSVSGAPGQRVTISCTGSSS | IGHV1-69 | IGHJ6 | IGLV1-40 | IGU2 | 2386 | ARGRGYSNY |
| | 2114 | | NIGAGYDVHWYQQLPETAPKLLIYAN | (Human) | (Human) | (Human) | (Human) | | GASYYMDV |
| | | | SNRPSGVPDRFSGSKSGTSASLAITGL | | | | | | |
| | | | QAEDEADYYCQSYDSSLSGSVFGGGT | | | | | | |
| | | | KLTVL | | | | | | |
| | COV2- | 1378 | NFMLTQPHSVSESPGKTVTISCTGSSG | IGHV4-39 | IGHJ5 | IGLV6-57 | IGU2 | 2387 | ARILVIFTLNW |
| | 2128 | | SIASNYVQWYQQRPGSAPTTVIYEDN | (Human) | (Human) | (Human) | (Human) | | FDP |
| | | | QRPSGVPDRFSGSIDSSSNSASLTISGL | | | | | | |
| | | | KTEDEADYYCQSYDSGNPIFGGGTKLT | | | | | | |
| | | | VL | | | | | | |
| | COV2- | 1379 | DIVMTQSPDSLAVSLGERATINCKSSQ | IGHV3-15 | IGHJ4 | IGKV4-1 | IGKJ4 | 2388 | TTAGSYYYDT |
| | 2130 | | SVLYSSNNKNYLAWYQQKPGQPPKLL | (Human) | (Human) | (Human) | (Human) | | VGPGLPEGKF |
| | | | MYWASTRESGVPDRFSGSGSGAEFTL | | | | | | DY |
| | | | TISSLQAEDVAIYYCQQYYSTLTFGGGT | | | | | | |
| | | | KVEIK | | | | | | |
| | COV2- | 1380 | DIQMTQSPSSLSASVGDRVTITCQASQ | IGHV3-53 | IGHJ5 | IGKV1-33 | IGKJ4 | 2389 | ARDFLRWHD |
| | 2132 | | DINNYLNWYQQKPGKAPKLLIYDASN | (Human) | (Human) | (Human) | (Human) | | L |
| | | | LETGVPLRFSGSGSGTDFTFTISSLQPE | | | | | | |
| | | | DIATYYCQQYDNLPPVFGGGTKVEIK | | | | | | |
| | COV2- | 1381 | NFMLTQPHSVSESPGKTVTFSCTGSSG | IGHV4-61 | IGHJ4 | IGLV6-57 | IGU2 | 2390 | AGSPVPPTIV |
| | 2137 | | SIASNYVQWYQQRPGSAPTTVIYEDN | (Human) | (Human) | (Human) | (Human) | | GASY |
| | | | QRPSGVPDRFSGSIDSSSNSASLTISGL | | | | | | |
| | | | KTEDEADYYCQSYDGINRWLVFGGGT | | | | | | |
| | | | KLTVL | | | | | | |
| | COV2- | 1382 | QPVLTQPPSASASLGASVTLTCTLSSGY | IGHV5-51 | IGHJ2 | IGLV9-49 | IGU2 | 2391 | ARRGEAAGI |
| | 2142 | | SNYKVDWYQQRPGKGPRFVMRVGT | (Human) | (Human) | (Human) | (Human) | | WYFDL |
| | | | GGIVGSKGDGIPDRFSVLGSGLNRYLTI | | | | | | |
| | | | KNIQEEDESDYHCGADHGSGSNFEYV | | | | | | |
| | | | VFGGGTKLTVL | | | | | | |
| | COV2- | 1383 | QSVVTQPPSASGTPGQRVTISCSGSSS | IGHV3-66 | IGHJ6 | IGLV1-44 | IGU1 | 2392 | AKEGGSGSLR |
| | 2143 | | NIGYNIVNWYQQLPGTAPKLLIYSNN | (Human) | (Human) | (Human) | (Human) | | YYYYGMDV |
| | | | QRPSGVPDRFSGSKSGTSASLSISGLQS | | | | | | |
| | | | EDEADYYCAAWDDSLNGYVFGTGTK | | | | | | |
| | | | VTVL | | | | | | |
| | COV2- | 1384 | DIQLTQSPSFLSASVGDRVTITCRASQG | IGHV3-48 | IGHJ6 | IGKV1-9 | IGKJ1 | 2393 | ARRSYRSSWY |
| | 2146 | | ISSYLAWYQQKPGKAPKLLIYAASTLQS | (Human) | (Human) | (Human) | (Human) | | YYYGMDV |
| | | | GVPSRFSGSGSGTEFTLTISSLQPEDFA | | | | | | |
| | | | TYYCQQLNSYPVTFGQGTKVEIK | | | | | | |
| | COV2- | 1385 | QSALTQPASVSGSPGQSITISCTGTSSD | IGHV3- | IGHJ6 | IGLV2-14 | IGU1 | 2394 | ARSTSGSYYY |
| | 2147 | | VGDYNYVSWYQQHPGKAPKLMIYDV | 303 | (Human) | (Human) | (Human) | | GMDV |
| | | | SNRPSGVSNRFSGSKSGNTASLTISGL | (Human) | | | | | |
| | | | QAEDEAEYYCSSYTSSSTLLYVFGTGTK | | | | | | |
| | | | VTVL | | | | | | |
| | COV2- | 1386 | SYVLTQPPSVSVAPGKTARITCGGNNI | IGHV3- | IGHJ3 | IGLV3-21 | IGU3 | 2395 | ARDWAPTYY |
| | 2150 | | GNKGVHWYQQKPGQAPVLVVDDDS | 303 | (Human) | (Human) | (Human) | | DMPSAFDI |
| | | | DRPSGIPERFSGSNSGNTATLIISSVEV | (Human) | | | | | |
| | | | GDEADFYCQVWDSSSDHPGVFGGGT | | | | | | |
| | | | KLTVL | | | | | | |
| | COV2- | 1387 | EIVLTQSPATLSLSPGERATLSCRASQS | IGHV1-69 | IGHJ1 | IGKV3-11 | IGKJ4 | 2396 | ARIGSYPEYFQ |
| | 2151 | | VSSFLAWYQQKPGQAPRLLIYDASNR | (Human) | (Human) | (Human) | (Human) | | |
| | | | ATGIPARFSGSGSGTDFTLTISSLEPED | | | | | | |
| | | | FAVYYCHYRSNWPPVLTFGGGTKVEIE | | | | | | |
| | COV2- | 1388 | DIQMTQSPSSLSASVGDRVTITCQASQ | IGHV4-31 | IGHJ4 | IGKV1-33 | IGKJ2 | 2397 | ARGGSGSYSL |
| | 2158 | | DITNYLNWYQQKPGKAPKLLIYDASNL | (Human) | (Human) | (Human) | (Human) | | FDY |
| | | | ETGVPSRFSGSGSGTDFTFTISSLQPED | | | | | | |
| | | | FATYYCQQYDNLYSVHFGQGTKLEIK | | | | | | |
| | COV2- | 1389 | QSALTQPASVSGSPGQSITISCTGTSSD | IGHV3- | IGHJ6 | IGLV2-14 | IGU1 | 2398 | ARSTSGSYYY |
| | 2159 | | VGDYNYVSWYQQHPGKAPKLMIYDV | 303 | (Human) | (Human) | (Human) | | GMDV |
| | | | SNRPSGVSNRFSGSKSGNTASLTISGL | (Human) | | | | | |
| | | | QAEDEAEYYCSSYTSSSTLLYVFGTGTK | | | | | | |
| | | | VTVL | | | | | | |
| | COV2- | 1390 | QSALTQPASVSGSPGQSITISCTGTSSD | IGHV3- | IGHJ6 | IGLV2-14 | IGU1 | 2399 | ARSTSGSYYY |
| | 2160 | | VGDYNYVSWYQQHPGKAPKLMIYDV | 303 | (Human) | (Human) | (Human) | | GMDV |
| | | | SNRPSGVSNRFSGSKSGNTASLTISGL | (Human) | | | | | |
| | | | QAEDEAEYYCSSYTSSSTLLYVFGTGTK | | | | | | |
| | | | VTVL | | | | | | |
| | COV2- | 1391 | DIQLTQSPSFLSASVGDRVTITCRASQG | IGHV3-66 | IGHJ6 | IGKV1-9 | IGKJ5 | 2400 | ARDLVTYGLD |
| | 2165 | | ISNYLAWYQQKPGTAPNLLIYAASTLQ | (Human) | (Human) | (Human) | (Human) | | V |
| | | | SGVPSRFSGSGSGTEFTLTISSLQPEDF | | | | | | |
| | | | ATYYCQLLNSHPLTFGQGTRLEIK | | | | | | |
| | COV2- | 1392 | EIVLTQSPATLSLSPGERATLSCRASQS | IGHV1-69 | IGHJ4 | IGKV3-11 | IGKJ3 | 2401 | ARIGHFDSSG |
| | 2166 | | VSSFLAWYQQKPGQAPRLLIYDASNR | (Human) | (Human) | (Human) | (Human) | | YYLDY |
| | | | PTGIPARFTGSGSGTDFTLTISSLEPED | | | | | | |
| | | | FAVYYCQHRTNWPPLFTFGPGTKVDIK | | | | | | |
| | COV2- | 1393 | SYELTQPPSVSVSPGQTASITCSGDKLG | IGHV3-7 | IGHJ4 | IGLV3-1 | IGU1 | 2402 | ARLSGSSWDF |
| | 2171 | | DKYACWYQQRPGQSPVLVIYQDSKRP | (Human) | (Human) | (Human) | (Human) | | DY |
| | | | SGIPERFSGSNSGNTATLTISGTQAMD | | | | | | |
| | | | EADYYCQAWDSSTGVFGTGTKVTVL | | | | | | |
| | COV2- | 1394 | DIQMTQSPSTLSASVGDRVTITCRASQ | IGHV3-20 | IGHJ6 | IGKV1-5 | IGKJ1 | 2403 | ARRRSSSRYSS |
| | 2173 | | SVSTWLAWYQQKPGKAPNLLIYEASSL | (Human) | (Human) | (Human) | (Human) | | GWYMYYYY |
| | | | ESGVPSRFSGSGSGTEFTLTISSLQPDD | | | | | | MDV |
| | | | FATYYCQQYNTYSGTFGQGTKVEIK | | | | | | |
| | COV2- | 1395 | SYELTQPPSVSVSPGQTASITCSGDKLG | IGHV3-7 | IGHJ4 | IGLV3-1 | IGU1 | 2404 | ARLSGSSWDF |
| | 2175 | | DKYACWYQQRPGQSPVLVIYQDSKRP | (Human) | (Human) | (Human) | (Human) | | DY |
| | | | SGIPERFSGSNSGNTATLTISGTQAMD | | | | | | |
| | | | EADYYCQAWDSSTGVFGTGTKVTVL | | | | | | |
| | COV2- | 1396 | DIQMTQSPSSLSASVGDRVTITCRARQ | IGHV2-5 | IGHJ3 | IGKV1-39 | IGKJ1 | 2405 | AHRLWFRDA |
| | 2177 | | SISNYLNWYQQKPGKAPKLLIYAASSL | (Human) | (Human) | (Human) | (Human) | | FDI |
| | | | HSGVPSRFSGSGSGTDFTLTISSLQPED | | | | | | |
| | | | FATYYCQQTYSTFWTFGQGTNVEIK | | | | | | |
| | COV2- | 1397 | SYELTQPPSVSVSPGQTASITCSGDKLG | IGHV3-7 | IGHJ4 | IGLV3-1 | IGU2 | 2406 | ARVGSSSWYF |
| | 2178 | | DKYACWYQQKPGQSPVVVIYQDSKR | (Human) | (Human) | (Human) | (Human) | | DY |
| | | | PSGIPERFSGSNSGNTATLTISGTQAM | | | | | | |
| | | | DEADYYCQAWDSSTAVFGGGTKLTVL | | | | | | |
| | COV2- | 1398 | QSALTQPASVSGSPGQSITISCTGTSSD | IGHV3- | IGHJ4 | IGLV2-14 | IGU2 | 2407 | ARADTMVRG |
| | 2183 | | VGGYNYVSWYQQHPGKAPKLMIYDV | 303 | (Human) | (Human) | (Human) | | TYFEY |
| | | | SNRPSGVSNRFSGSKSGNTASLTISGL | (Human) | | | | | |
| | | | QAEDEADYCCSSYTSSRAVLFGGGTKL | | | | | | |
| | | | TVL | | | | | | |
| | COV2- | 1399 | SYVLTQPPSVSVAPGKTANITCGGNNI | IGHV3- | IGHJ4 | IGLV3-21 | IGU3 | 2408 | ARGGATNFD |
| | 2187 | | GRKSVHWYQQKSGQAPVLVVYDDSD | 303 | (Human) | (Human) | (Human) | | Y |
| | | | RPSGIPERFSGSNSGNTATLTISRVEAG | (Human) | | | | | |
| | | | DEADYYCQVWDSSSDHPEWVFGGGT | | | | | | |
| | | | KLTVL | | | | | | |
| | COV2- | 1400 | DIQMTQSPSSLSASVGDRVTITCRASQ | IGHV3-9 | IGHJ5 | IGKV1-39 | IGKJ4 | 2409 | TKASRYCSSTI |
| | 2189 | | SISSYLNWYQQKPGKAPKLLIYGASSLQ | (Human) | (Human) | (Human) | (Human) | | CYWNWFDP |
| | | | TGVPSRFSGSGSGTDFTLTIRSLQPEDF | | | | | | |
| | | | ASYYCQQSYSTPTFGGGTKVEIK | | | | | | |
| | COV2- | 1401 | QSALTQPASVSGSPGQSITISCTGTSSD | IGHV3-48 | IGHJ4 | IGLV2-14 | IGU2 | 2410 | AREARSRYFD |
| | 2190 | | IGGYNYVSWYQQHPGKAPKLLIYDVS | (Human) | (Human) | (Human) | (Human) | | WLPSYYFDY |
| | | | NRPSGVSTRFSGSKSGNTASLTISGLQ | | | | | | |
| | | | AEDEADYYCSSYTSSSTHVVFGGGTKL | | | | | | |
| | | | TVL | | | | | | |
| | COV2- | 1402 | DIQMTQSPSTLSASVGDRVTITCRASQ | IGHV3-20 | IGHJ6 | IGKV1-5 | IGKJ1 | 2411 | ARRRSSSRYSS |
| | 2191 | | SVSTWLAWYQQKPGKAPNLLIYEASSL | (Human) | (Human) | (Human) | (Human) | | GWYMYYYY |
| | | | ESGVPSRFSGSGSGTEFTLTISSLQPDD | | | | | | MDV |
| | | | FATYYCQQYNTYSGTFGQGTKVEIK | | | | | | |
| | COV2- | 1403 | DIVMTQSPDFLAVSLGERATISCKSSQS | IGHV3-30 | IGHJ4 | IGKV4-1 | IGKJ4 | 2412 | AKGGDGSG |
| | 2195 | | VLYTPKNKNYLAWYKQKPGQPPKVLIY | (Human) | (Human) | (Human) | (Human) | | WAWDGDNP |
| | | | WASTRESGVPDRFSGSGSGTDFTLIISS | | | | | | PTDY |
| | | | LQAEDAAVYYCQQYYTAPLTFGGGTR | | | | | | |
| | | | VEIK | | | | | | |
| | COV2- | 1404 | EIVLTQSPGTLSLSPGERATLSCRASQS | IGHV1-58 | IGHJ3 | IGKV3-20 | IGKJ1 | 2413 | AAPYCSSISCN |
| | 2196 | | VSSSYLAWYQQKPGQAPRLLIYGASSR | (Human) | (Human) | (Human) | (Human) | | DGFDI |
| | | | ATGIPDRFSGSGSGTDFTLTISRLEPED | | | | | | |
| | | | FAVYYCQHYGSSRGWTFGQGTKVEIK | | | | | | |
| | COV2- | 1405 | EIVLTQSPGTLSLSPGERATLSCRASQS | IGHV5-51 | IGHJ2 | IGKV3-20 | IGKJ5 | 2414 | ARPDYSSGW |
| | 2197 | | VSSNFLAWYQQKPGQAPRLLIYGASS | (Human) | (Human) | (Human) | (Human) | | FSYWYFDL |
| | | | RATGIPDRFSGSGSGTDFTLTISRLEPE | | | | | | |
| | | | DFAVYYCQQYGRSPITFGQGTRLEIK | | | | | | |
| | COV2- | 1406 | SYELTQPPSVSVSPGQTASITCFGDKLG | IGHV1-24 | IGHJ4 | IGLV3-1 | IGU2 | 2415 | ATGFAVFGRA |
| | 2199 | | DKYACWFQQKPGQSPVLIIYQGAKRP | (Human) | (Human) | (Human) | (Human) | | AVPY |
| | | | SGIPERFSGSNSGNTATLTISGTQAMD | | | | | | |
| | | | EADYYCQAWDSSTVVFGGGTKLTVL | | | | | | |
| | COV2- | 1407 | DIQMTQSPSSLSASVGDRVTITCRASQ | IGHV3-30 | IGHJ6 | IGKV1-39 | IGKJ2 | 2416 | ARGSAGNYYY |
| | 2203 | | TITNYLNWYQLKSGRAPKLLIYAASSLQ | (Human) | (Human) | (Human) | (Human) | | GMDV |
| | | | SGVPSRFSGSGSGTDFTLTISSLQPEDF | | | | | | |
| | | | ATYYCQQSYSTPYTFGQGTKLEIK | | | | | | |
| | COV2- | 1408 | QSVLTQPPSVSGAPGQRVTISCTGSSS | IGHV5-51 | IGHJ4 | IGLV1-40 | IGU3 | 2417 | ASALRERGVQ |
| | 2207 | | NIGAGYDVHWYQQLPGTAPKLLIFINS | (Human) | (Human) | (Human) | (Human) | | LWSV |
| | | | NRPSGVPDRFSGSKSGTSASLAITGLQ | | | | | | |
| | | | AEDEADYYCQSYDSSLGALFGGGTKLT | | | | | | |
| | | | VL | | | | | | |
| | COV2- | 1409 | DIQMTQSPSSVSASVGDRVTITCRASQ | IGHV3- | IGHJ4 | IGKV1-12 | IGKJ3 | 2418 | ARDQEWFRE |
| | 2210 | | GISSWLAWYQQKPGKAPKLLIYDASSL | 303 | (Human) | (Human) | (Human) | | LFLFDY |
| | | | QSGVPSRFSGSGSGTDFTLTISSLQPED | (Human) | | | | | |
| | | | FATYYCQQANSFPPTFGPGTKVDIK | | | | | | |
| | COV2- | 1410 | EIVLTQSPAILSLSPGERATLSCRASQS | IGHV3-21 | IGHJ6 | IGKV3-11 | IGKJ1 | 2419 | ARVNGNSN |
| | 2212 | | VSSYLAWYQQKPGQAPRLLIYDTSNRAT | (Human) | (Human) | (Human) | (Human) | | WNFGSYYYYY |
| | | | GIPARFSGSGSGTDFTLTISSLEPEDFA | | | | | | MDV |
| | | | FYYCQQRGNWWTFAQGTKVEIK | | | | | | |
| | COV2- | 1411 | EIVLTQSPATLSLSPGERATLSCRASQS | IGHV1-69 | IGHJ4 | IGKV3-11 | IGKJ3 | 2420 | ARIGHFDSSG |
| | 2214 | | VSSFLAWYQQKPGQAPRLLIYDASNR | (Human) | (Human) | (Human) | (Human) | | YYLDY |
| | | | PTGIPARFTGSGSGTDFTLTISSLEPED | | | | | | |
| | | | FAVYYCQHRTNWPPLFTFGPGTKVDIK | | | | | | |
| | COV2- | 1412 | EIVMTQSPATLSVSPGERATLSCRASQ | IGHV3-21 | IGHJ6 | IGKV3-15 | IGKJ1 | 2421 | ARWLQLRSD |
| | 2215 | | SVSNNLAWYQHKPGQAPRLLIYGAST | (Human) | (Human) | (Human) | (Human) | | YYYFGMDV |
| | | | RATGIPARFSGSGSGTEFTLTISSLQSE | | | | | | |
| | | | DFAVYFCQQCYNWPPWTFGQGTKVE | | | | | | |
| | | | IK | | | | | | |
| | COV2- | 1413 | EIVLTQSPATLSLSPGERATLSCRASQS | IGHV1-69 | IGHJ4 | IGKV3-11 | IGKJ4 | 2422 | ARTSHYDSSG |
| | 2216 | | VSSYLAWYQQKPGQAPRLLIYDASNR | (Human) | (Human) | (Human) | (Human) | | SYFEY |
| | | | ATGIPARFSGSGSGTDFTLTISSLDPED | | | | | | |
| | | | FAVYYCHKRSNWPPSLTFGGGTKVEIK | | | | | | |
| | COV2- | 1414 | DIVMTQSPDSLAVSLGERATINCKSSQ | IGHV3-30 | IGHJ6 | IGKV4-1 | IGKJ1 | 2423 | ARPYTGSYKS |
| | 2218 | | SVLYSSNNKNSLAWYQQKPGQPPKLLI | (Human) | (Human) | (Human) | (Human) | | YMDV |
| | | | YWASTRESGVPDRFSGSGSGTDFTLTI | | | | | | |
| | | | SSLQAEDVAVYYCQQYYSISWTFGQG | | | | | | |
| | | | TKVEIK | | | | | | |
| | COV2- | 1415 | QSALTQPASVSGSPGQSITISCTGTSSD | IGHV4-59 | IGHJ4 | IGLV2-23 | IGU2 | 2424 | ARAPRERLQ |
| | 2222 | | VGSYNLVSWYQQHAGKAPKLMIYEVI | (Human) | (Human) | (Human) | (Human) | | WGEYYFDY |
| | | | KRPSGVSNRFSGSKSGNTASLTISGLQ | | | | | | |
| | | | AEDEADYYCCSYAVSTTYVIFGGGTKLT | | | | | | |
| | | | VL | | | | | | |
| | COV2- | 1416 | DIVMTQSPDSLAVSLGERATINCKSSQ | IGHV3-30 | IGHJ4 | IGKV4-1 | IGKJ1 | 2425 | AKDGSIAAAD |
| | 2224 | | SVLHSSNNKDSLVWYQQKPGQPPKLL | (Human) | (Human) | (Human) | (Human) | | Y |
| | | | IYWASSRESGVPDRFSGSGSGTDFTLTI | | | | | | |
| | | | SSLQAEDVAVYYCQQYYSTPWTFGQG | | | | | | |
| | | | TKVEIK | | | | | | |
| | COV2- | 1417 | QPVLTQPPSASASLGASVTLTCTLSSGY | IGHV5-51 | IGHJ4 | IGLV9-49 | IGU2 | 2426 | ATHRCSGGFC |
| | 2226 | | SNYKVDWYQQRPGKGPRFVMRVGT | (Human) | (Human) | (Human) | (Human) | | YLAY |
| | | | GGIVGSKGDGIPDRFSVLGSGLNRYLTI | | | | | | |
| | | | KNIQEEDESDYHCGADHGSGSNFVFV | | | | | | |
| | | | VFGGGTKLTVL | | | | | | |
| | COV2- | 1418 | DIVMTQSPLSLPVTPGEPASISCRSSQS | IGHV3-33 | IGHJ6 | IGKV2-28 | IGKJ3 | 2427 | ARDQSQGAYI |
| | 2227 | | LLHSNGYNYLDWYLQKPGQSPQFLIYL | (Human) | (Human) | (Human) | (Human) | | LTGYRGYGM |
| | | | GSNRASGVPDRFSGSGSGTDFILKISR | | | | | | DV |
| | | | VEAEDVGVYYCMQALQTPFTFGPGTK | | | | | | |
| | | | VDIK | | | | | | |
| | COV2- | 1419 | EIVMTQSPATLSVSPGERATLSCRASQ | IGHV4-34 | IGHJ6 | IGKV3-15 | IGKJ4 | 2428 | ARPPQAARIH |
| | 2228 | | SVSSNLAWYQQKPGQAPRLLIYGAST | (Human) | (Human) | (Human) | (Human) | | YYYYMDV |
| | | | RATGIPARFSGSGSGTEFTLTISSLQSE | | | | | | |
| | | | DFAVYYCQQYNYWPPLTFGGGTKVEI | | | | | | |
| | | | K | | | | | | |
| | COV2- | 1420 | SYVLTQPPSVSVAPGKTARITCEGNNI | IGHV3-9 | IGHJ6 | IGLV3-21 | IGU2 | 2429 | AKGRGAGYTS |
| | 2231 | | GSKSVHWYQQKPGQAPVLVVYDDSG | (Human) | (Human) | (Human) | (Human) | | YMDV |
| | | | RPSGIPERFSGSNSGNTATLTISRVEAG | | | | | | |
| | | | DEADYFCQVWDSSSDHHVVFGGGTK | | | | | | |
| | | | LTVL | | | | | | |
| | COV2- | 1421 | DIQMTQSPSTLSASVGDRVTITCRASH | IGHV3-53 | IGHJ4 | IGKV1-5 | IGKJ1 | 2430 | ARESTQ |
| | 2235 | | SISSWLAWYQQKPGKAPKLLIYKASSL | (Human) | (Human) | (Human) | (Human) | | |
| | | | ESGVPSRFSGSGSGTEFTLTISSLQPDD | | | | | | |
| | | | FATYYCQQYNTYSQTFGQGTKVEIK | | | | | | |
| | COV2- | 1422 | FYELTQPPSVSVSPGQTAGITCSGDKL | IGHV2-5 | IGHJ4 | IGLV3-1 | IGU3 | 2431 | AHRAVILNFD |
| | 2238 | | GHKYAYWYQQKPGQSPILLIYQDDKR | (Human) | (Human) | (Human) | (Human) | | |
| | | | PSGIPERFSGSNSGTIATLTISGTQPVD | | | | | | |
| | | | EADYYCQAWDNDAGVVFGGGTKLTV | | | | | | |
| | | | L | | | | | | |
| | COV2- | 1423 | DIQMTQSPSSLSASVGDRVTITCRASQ | IGHV3- | IGHJ4 | IGKV1-16 | IGKJ4 | 2432 | ARPRSGSYYA |
| | 2239 | | GISNYLAWFQQKPGKAPKSLIYAASSL | 303 | (Human) | (Human) | (Human) | | YFDY |
| | | | QSGVPSKFSGSGSGTDFTLTISSLQPED | (Human) | | | | | |
| | | | VATYYCQQYNSHPPTFGGGTKVEIK | | | | | | |
| | COV2- | 1424 | QSALTQPPSASGSPGQSVTISCTGTSS | IGHV3-9 | IGHJ4 | IGLV2-8 | IGU2 | 2433 | AKVGYTISRQ |
| | 2240 | | DVGTYNYVSWYQQHPGKAPKLMIYE | (Human) | (Human) | (Human) | (Human) | | WLVGEFDY |
| | | | VSKRPSGVPDRFSGSKSGNTASLTVSG | | | | | | |
| | | | LQAEDEAEYYCSAYAGSNNLVFGGGT | | | | | | |
| | | | KLTVL | | | | | | |
| | COV2- | 1425 | QPVLTQPPSASASLGASVTLTCTLSSGY | IGHV5-51 | IGHJ2 | IGLV9-49 | IGU2 | 2434 | ARRGEAAGI |
| | 2241 | | SNYKVDWYQQRPGKGPRFVMRVGT | (Human) | (Human) | (Human) | (Human) | | WYFDL |
| | | | GGIVGSKGDGIPDRFSVLGSGLNRYLTI | | | | | | |
| | | | KNIQEEDESDYHCGADHGSGSNFEYV | | | | | | |
| | | | VFGGGTKLTVL | | | | | | |
| | COV2- | 1426 | QSALTQPASVSGSHGQSITISCTGTSSD | IGHV4-39 | IGHJ4 | IGLV2-23 | IGU2 | 2435 | ARQSRGYSYA |
| | 2243 | | VGSYNLVSWYQQHPGKAPKLMIYEVS | (Human) | (Human) | (Human) | (Human) | | WSFDY |
| | | | KRPSGVSNRFSGSTSGNTASLTISGLQ | | | | | | |
| | | | AEDEADYYCCSYAGIVLFGGGTKVTVL | | | | | | |
| | COV2- | 1427 | SYELTQPPSVSVSPGQTTRITCSGDALP | IGHV3-33 | IGHJ6 | IGLV3-25 | IGU3 | 2436 | AGSSGEGGLY |
| | 2245 | | KQYGYWYQQKAGQAPILVIYKDSERP | (Human) | (Human) | (Human) | (Human) | | YYYGMDV |
| | | | SGIPERFSGSSSGTTVTLTISGVQAEDE | | | | | | |
| | | | AHYYCQSGDSSGTYVVFGGGTKLTVL | | | | | | |
| | COV2- | 1428 | SYELTQPPSVSVSPGQTARITCSGDALS | IGHV3-30 | IGHJ4 | IGLV3-25 | IGU3 | 2437 | ARDSGGNYG |
| | 2248 | | KQYAYWYQQKPGQAPVLVIYKDSERP | (Human) | (Human) | (Human) | (Human) | | DSYFDY |
| | | | SGIPERFSGSSSGTTVTLTISGVQAEDE | | | | | | |
| | | | ADYYCQSVDRSGTYFNWVFGGGTKLT | | | | | | |
| | | | VL | | | | | | |
| | COV2- | 1429 | DIQMTQSPSSLSASVGDRVTITCRASQ | IGHV3-30 | IGHJ6 | IGKV1-39 | IGKJ2 | 2438 | ARGSAGNYYY |
| | 2250 | | TITNYLNWYQLKSGRAPKLLIYAASSLQ | (Human) | (Human) | (Human) | (Human) | | GMDV |
| | | | SGVPSRFSGSGSGTDFTLTISSLQPEDF | | | | | | |
| | | | ATYYCQQSYSTPYTFGQGTKLEIK | | | | | | |
| | COV2- | 1430 | QTVVTQEPSLTVSPGGTVTLTCASSAG | IGHV2-26 | IGHJ5 | IGLV7-43 | IGU3 | 2439 | ARIVLGASGT |
| | 2251 | | AVTSGYYPNWFQQKPGQAPRALIYST | (Human) | (Human) | (Human) | (Human) | | YPSPGFDP |
| | | | ANKHSWTLARFSGSLLGGKAALTLSG | | | | | | |
| | | | VQPEDEAEYYCLLYYGGAWVFGGGTK | | | | | | |
| | | | LTVL | | | | | | |
| | COV2- | 1431 | NFMLTQPHSVSESPGKTVTISCTGSSG | IGHV3-74 | IGHJ4 | IGLV6-57 | IGU2 | 2440 | AGSPWLRGDI |
| | 2253 | | SIASNYVQWYQQRPGSAPTTVIYEDN | (Human) | (Human) | (Human) | (Human) | | DY |
| | | | QRPSGVPDRFSGSIDSSSNSASLTISGL | | | | | | |
| | | | MTEDEADYYCQSYDGSNHAVVFGGG | | | | | | |
| | | | TKLTVL | | | | | | |
| | COV2- | 1432 | SYVLTQPPSVSVAPGKTARITCGGNNI | IGHV7-4- | IGHJ5 | IGLV3-21 | IGU2 | 2441 | ARDPSYCSST |
| | 2256 | | GSKNVHWYQQKPGQAPVVVVYDDS | 1 | (Human) | (Human) | (Human) | | RCYTVGWFD |
| | | | DRPSGIPERFSGSNSGNTATLTISRVEA | (Human) | | | | | P |
| | | | GDEADYYCQVWDSSSDPVVFGGGTK | | | | | | |
| | | | LTVL | | | | | | |
| | COV2- | 1433 | NIVMTQSPLSLPVTPGEPASISCRSSQS | IGHV4-61 | IGHJ4 | IGKV2-28 | IGKJ1 | 2442 | ARGHVAAWE |
| | 2257 | | LLNSNGLTYLDWYLQKPGQSPQLLIYF | (Human) | (Human) | (Human) | (Human) | | SCYY |
| | | | VSNRASGVSDRFSGSGSGADFTLTISR | | | | | | |
| | | | VEAEDVGVYYCMQALQTPQTFGQGT | | | | | | |
| | | | KVEIK | | | | | | |
| | COV2- | 1434 | EIVLTQSPGTLSLSPGERATLSCGASQS | IGHV3-20 | IGHJ3 | IGKV3-20 | IGKJ4 | 2443 | ARARGPSEQY |
| | 2258 | | ISSSYLAWYQQKPGQAPRLLIYGASSRA | (Human) | (Human) | (Human) | (Human) | | YDLLTGYYDA |
| | | | AGIPDRFSGSGSGTDFTLTISRLEPEDF | | | | | | FDI |
| | | | AVYFCQQYGGSLTFGGGTKVEIK | | | | | | |
| | COV2- | 1435 | SYELTQPPSVSVSPGQTASITCSGDKM | IGHV3-23 | IGHJ4 | IGLV3-1 | IGU2 | 2444 | AQMGPLGST |
| | 2260 | | GDKYACWYQQKPGQSPVVVIYEDNK | (Human) | (Human) | (Human) | (Human) | | SSAADY |
| | | | RPSGIPERFSGSNSGNTATLTISGTQA | | | | | | |
| | | | MDEADYYCQAWDSSLVVFGGGTKLT | | | | | | |
| | | | VL | | | | | | |
| | COV2- | 1436 | QSALTQPPSVSGSPGQSVTISCTGTSS | IGHV1-8 | IGHJ6 | IGLV2-18 | IGU3 | 2445 | AREARYFDWI |
| | 2262 | | DVGSYNRVSWYQQPPGTAPKLMIYE | (Human) | (Human) | (Human) | (Human) | | FEGSDYYYYG |
| | | | VSNRPSGVPDRFSGSKSGNTASLTISG | | | | | | MDV |
| | | | LQAEDEADYYCSSYTSSSLRVFGGGTK | | | | | | |
| | | | LTVL | | | | | | |
| | COV2- | 1437 | DIQLTQSPSFLSASVGDRVTITCRASQG | IGHV3-48 | IGHJ6 | IGKV1-9 | IGKJ1 | 2446 | ARRSYRSSWY |
| | 2263 | | ISSYLAWYQQKPGKAPKLLIYAASTLQS | (Human) | (Human) | (Human) | (Human) | | YYYGMDV |
| | | | GVPSRFSGSGSGTEFTLTISSLQPEDFA | | | | | | |
| | | | TYYCQQLNSYPVTFGQGTKVEIK | | | | | | |
| | COV2- | 1438 | QSALTQPRSVSGSPGQSVTISCTGTSS | IGHV3-49 | IGHJ3 | IGLV2-11 | IGU1 | 2447 | IRDYDFWGG |
| | 2266 | | DVGGYNYVSWYQQHPGKAPKLMIYD | (Human) | (Human) | (Human) | (Human) | | YYYHPLRAFDI |
| | | | VTKRPSGVPERFSGSKSGNTASLTISGL | | | | | | |
| | | | QAEDEADYSCCSYAGSYTYVFGTGTKV | | | | | | |
| | | | TVL | | | | | | |
| | COV2- | 1439 | QSALTQPASVSGSPGQSITISCTGTGSD | IGHV2-5 | IGHJ3 | IGLV2-14 | IGU2 | 2448 | ARHQIVVLFD |
| | 2268 | | VGGSNYVSWYQQHPGKAPKLMIYDV | (Human) | (Human) | (Human) | (Human) | | M |
| | | | SNRPSGVSNRFSGSKSGNTASLTISGL | | | | | | |
| | | | QAEDEADYYCSSYTSSSTLVLFGGGTKL | | | | | | |
| | | | SVL | | | | | | |
| | COV2- | 1440 | EIVLTQSPATLSLSPGERATLSCRASQS | IGHV1-69 | IGHJ4 | IGKV3-11 | IGKJ2 | 2449 | AITYYYDSSGY |
| | 2270 | | VSSFLAWYQQKPGQAPRLLIYDASNR | (Human) | (Human) | (Human) | (Human) | | WWDD |
| | | | ATGIPARFSGSGSGTDFTLTISSLEPED | | | | | | |
| | | | FAVYYCQQRSNWPPSYTFGQGTKLEIK | | | | | | |
| | COV2- | 1441 | QSALTQPASVSGSPGQSITISCTGTSSD | IGHV4-39 | IGHJ6 | IGLV2-14 | IGU3 | 2450 | AGEEVRGVKL |
| | 2273 | | IGGYNYVSWYQQHPGKAPKLMIYDVS | (Human) | (Human) | (Human) | (Human) | | YYYYAMDV |
| | | | NRPSGVSNRFSGSKSGNTASLTISGLQ | | | | | | |
| | | | AEDEADYYCSSYTSISTWVFGGGTKVT | | | | | | |
| | | | VL | | | | | | |
| | COV2- | 1442 | SYELTQPSSVSVSPGQTARITCSGDALP | IGHV3-48 | IGHJ4 | IGLV3-10 | IGU2 | 2451 | ARDRGWNYG |
| | 2274 | | KRYAYWYRQKSGQAPVLVIHEDSKRP | (Human) | (Human) | (Human) | (Human) | | LDY |
| | | | SGIPERFSGSTSGTMATLTITGAQLEDE | | | | | | |
| | | | ADYYCFSMDSSGDLRVFGGGTKLTVL | | | | | | |
| | COV2- | 1443 | DIQMTQSPSSLSASVGDRVTITCRASQ | IGHV3-30 | IGHJ4 | IGKV1-39 | IGKJ4 | 2452 | ARDVPTTVTA |
| | 2277 | | SISTYLNWYQQKPGKAPKLLIYAASSLQ | (Human) | (Human) | (Human) | (Human) | | FTVFTY |
| | | | SGVPSRFSGSGSGTDFTLTISSLQPEDY | | | | | | |
| | | | ATYYCQQSYSTPGLTFGGGTKVEIK | | | | | | |
| | COV2- | 1444 | QSALTQPASVSGSPGQSITISCTGTSSD | IGHV3- | IGHJ4 | IGLV2-14 | IGU2 | 2453 | ARVPVMVRG |
| | 2281 | | VVGYNYVSWYQQHPGKAPKLMIYDV | 303 | (Human) | (Human) | (Human) | | VYFDY |
| | | | RNRPSGVSNRFSGSKSGNTASLTISGL | (Human) | | | | | |
| | | | QAEDEADYFCISYTSSRTLVFGGGTKLT | | | | | | |
| | | | VL | | | | | | |
| | COV2- | 1445 | SYVLTQPPSVSVAPGKTARITCGGNNI | IGHV1-8 | IGHJ6 | IGLV3-21 | IGU2 | 2454 | ARGYGLTYY |
| | 2287 | | GSKNVHWYQQKPGQAPVLVVYDDS | (Human) | (Human) | (Human) | (Human) | | MDV |
| | | | DRPSGIPERFSGSNSGNTATLTISRVEA | | | | | | |
| | | | GDEADYYCQVWDSSYYHPVVFGGGT | | | | | | |
| | | | KLTVL | | | | | | |
| | COV2- | 1446 | QSVLTQPPSASGTPGQRVTISCSGSNS | IGHV1-8 | IGHJ4 | IGLV1-44 | IGU2 | 2455 | ARMRSGWPT |
| | 2290 | | NIGSYTVNWYQQFPGTAPKLLIYDNN | (Human) | (Human) | (Human) | (Human) | | HGRPDDF |
| | | | QRTSGVPDRFSGSKSGTSASLAISGLQ | | | | | | |
| | | | SEDEANYYCLVWDDSLNGLVFGGGTK | | | | | | |
| | | | LTVL | | | | | | |
| | COV2- | 1447 | QSVLTQPPSVSAAPGQKVTISCSGSSS | IGHV3-23 | IGHJ4 | IGLV1-51 | IGU2 | 2456 | AKNERITMLV |
| | 2293 | | NIGNNYISWYQQLPGTAPKLLIYDNNK | (Human) | (Human) | (Human) | (Human) | | VVTLFDY |
| | | | RPSGIPDRFSGSKSGTSATLGITGLQTG | | | | | | |
| | | | DEADYYCGTWDSSLSAVVFGGGTKLT | | | | | | |
| | | | VL | | | | | | |
| | COV2- | 1448 | DIQMTQSPSTLSASVGDRVTITCRASQ | IGHV3-66 | IGHJ6 | IGKV1-5 | IGKJ1 | 2457 | ARDPSAYYDIL |
| | 2296 | | SINSWLAWYQQKPGKAPKLLIYKASSL | (Human) | (Human) | (Human) | (Human) | | TGYSGDV |
| | | | ESGVPSRFSGSGSGTEFTLTISSLQPDD | | | | | | |
| | | | FATYYCQQYSIYSWTFGQGTKVEIK | | | | | | |
| | COV2- | 1449 | DIQMTQSPSSLSACVGDRVTITCRASQ | IGHV3- | IGHJ4 | IGKV1-39 | IGKJ1 | 2458 | ARDIDSGYDP |
| | 2299 | | SISSYLNWYQQKPGKGPKLLIYAASSLQ | 303 | (Human) | (Human) | (Human) | | TPVFDY |
| | | | SGVPSRFSGSGSGTDFTLTISSLQPEDF | (Human) | | | | | |
| | | | ATYYCQQSYSTPWTFGQGTKVEIK | | | | | | |
| | COV2- | 1450 | DIQMTQSPSSVSASVGDRVTITCRASQ | IGHV4-4 | IGHJ4 | IGKV1-12 | IGKJ4 | 2459 | ASRWGDYFD |
| | 2300 | | GISSWLAWYQQKPGKAPKLLIYAASSL | (Human) | (Human) | (Human) | (Human) | | SSGAYDS |
| | | | QRGVPSRFSGSGSGTDFTLTISSLQPE | | | | | | |
| | | | DFATYYCQQANSLPLTFGGGTKVEVK | | | | | | |
| | COV2- | 1451 | QSVLTQPPSASGTPGQRVTISCSGSSS | IGHV3-21 | IGHJ4 | IGLV1-44 | IGU2 | 2460 | ARDPVWVDG |
| | 2304 | | NIESNSVNWYQQLPGTAPKLLIYSNN | (Human) | (Human) | (Human) | (Human) | | ELLSGGIPFDY |
| | | | QRPSGVPDRFSGSKSGTSASLAISGLQ | | | | | | |
| | | | SEDEADYYCAAWDDSLNGVVFGGGT | | | | | | |
| | | | KLTVL | | | | | | |
| | COV2- | 1452 | QSVLTQPPSASGTPGQRVTISCSGSTS | IGHV4-39 | IGHJ6 | IGLV1-44 | IGU3 | 2461 | AILWRGSSW |
| | 2305 | | NIGSNTVNWYQQLPGTAPKLLIYSNN | (Human) | (Human) | (Human) | (Human) | | ADRHYYYYSM |
| | | | QRPSGVPDRFSGSKSGPSASLAISGLQ | | | | | | DV |
| | | | SVDEADYYCAAWDDSLNGWVFGGG | | | | | | |
| | | | TKLTVL | | | | | | |
| | COV2- | 1453 | SYELTQSPSVSVSPGQTASITCSGDKLG | IGHV3- | IGHJ5 | IGLV3-1 | IGU3 | 2462 | ARDLGRGLDP |
| | 2307 | | DKYACWYQQRPGQSPVLVIYQDSQR | 303 | (Human) | (Human) | (Human) | | |
| | | | PSGIPERFSGSNSGNTATLTISGTQAM | (Human) | | | | | |
| | | | DEADYYCQAWDSSTAVFGGGTKLTVL | | | | | | |
| | COV2- | 1454 | DIVMTQSPATLSVSPGERAILSCRASQ | IGHV3-23 | IGHJ3 | IGKV3-15 | IGKJ1 | 2463 | VKGLFDWFPL |
| | 2308 | | SVRSNLAWYQQKPGQAPRLLISGAST | (Human) | (Human) | (Human) | (Human) | | |
| | | | RATAIPARFSGSGSGTEFTLTITSLQSE | | | | | | |
| | | | DCAVYYCHQYNNWPQTFGQGTKVEIK | | | | | | |
| | COV2- | 1455 | DIQMTQSPSSLSASVGDRVTITCRASQ | IGHV4-61 | IGHJ6 | IGKV1-39 | IGKJ4 | 2464 | ATGYIGTYYYY |
| | 2310 | | SISTYLNWYQQKPGKAPKLLIYAASSLQ | (Human) | (Human) | (Human) | (Human) | | MDV |
| | | | SGVPSRFSGSGSGTDFTLTISSLQPEDF | | | | | | |
| | | | ATYHCQQSYSTLTFGGGTKVEIK | | | | | | |
| | COV2- | 1456 | EIVLTQSPATLSLSPGERATLSCRASQS | IGHV3-9 | IGHJ4 | IGKV3-11 | IGKJ4 | 2465 | AKVSSITSLLG |
| | 2313 | | VSSYLAWYQQKPGQAPRLLIYDASNR | (Human) | (Human) | (Human) | (Human) | | YYFDS |
| | | | ATGIPARFSGSGSGTDFTLTISSLEPED | | | | | | |
| | | | FAVYYCQHRSNWPPRLTFGGGTKVEIK | | | | | | |
| | COV2- | 1457 | DIQMTQSPSSLSASVGDRVTITCRASQ | IGHV2-70 | IGHJ4 | IGKV1-39 | IGKJ5 | 2466 | ARGVVTYDY |
| | 2318 | | SIAGYLNWYQQKPGKAPKLLIYGTTSL | (Human) | (Human) | (Human) | (Human) | | |
| | | | QSGVPVRFSGSGSGTDFTLTISSLQPE | | | | | | |
| | | | DFATYYCQQSYSTPGTFGQGTRLEIK | | | | | | |
| | COV2- | 1458 | EIVLTQSPGTLSLSPGERATLSCRASQS | IGHV3-30 | IGHJ5 | IGKV3-20 | IGKJ2 | 2467 | ARGDGYRSQ |
| | 2322 | | VSSSYLAWYQQKPGQAPRLLIYGASSR | (Human) | (Human) | (Human) | (Human) | | FDP |
| | | | ATGIPDRFSGSGSGTDFTLTISRLEPED | | | | | | |
| | | | FAVYYCQQYGSSYTFGQGTKLEIK | | | | | | |
| | COV2- | 1459 | DIQMTQSPSSLSASVGDRVTITCRARQ | IGHV2-5 | IGHJ3 | IGKV1-39 | IGKJ1 | 2468 | AHRLWFRDA |
| | 2325 | | SISNYLNWYQQKPGKAPKLLIYAASSL | (Human) | (Human) | (Human) | (Human) | | FDI |
| | | | HSGVPSRFSGSGSGTDFTLTISSLQPED | | | | | | |
| | | | FATYYCQQTYSTFWTFGQGTNVEIK | | | | | | |
| | COV2- | 1460 | QSVLTQPPSASGTPGQRVTISCSGSSS | IGHV3-23 | IGHJ6 | IGLV1-47 | IGU3 | 2469 | ARVEGDWLL |
| | 2329 | | NIGSNYVYWYQQLPGTAPKLLISRNN | (Human) | (Human) | (Human) | (Human) | | GGPYYHYYG |
| | | | QRPSGVPDRFSGSKSGTSASLAISGLRS | | | | | | MDV |
| | | | EDEADYYCAAWDDSLSSWVFGGGTK | | | | | | |
| | | | LTVL | | | | | | |
| | COV2- | 1461 | NFMLTQPHSVSESPGKTVTISCTGSSG | IGHV4-39 | IGHJ5 | IGLV6-57 | IGU2 | 2470 | ARILVIFTLNW |
| | 2331 | | SIASNYVQWYQQRPGSAPTTVIYEDN | (Human) | (Human) | (Human) | (Human) | | FDP |
| | | | QRPSGVPDRFSGSIDSSSNSASLTISGL | | | | | | |
| | | | KTEDEADYYCQSYDSGNPIFGGGTKLT | | | | | | |
| | | | VL | | | | | | |
| | COV2- | 1462 | SYELTQPPSVSVSPGQTASITCSGDKLG | IGHV3-7 | IGHJ4 | IGLV3-1 | IGU3 | 2471 | ARLGGSSWH |
| | 2333 | | DKYSSWYQQKPGQSPVLVIYEDTKRPS | (Human) | (Human) | (Human) | (Human) | | FDY |
| | | | GIPERFSGSNSGNTATLTISGTQAMDE | | | | | | |
| | | | ADYYCQAWSSSTAVFGGGTKLTVL | | | | | | |
| | COV2- | 1463 | QSALTQPASVSGSPGQSITISCTGTSSD | IGHV4-39 | IGHJ6 | IGLV2-14 | IGU2 | 2472 | ARHDGSGEM |
| | 2335 | | VGGYNYVSWYQQHPGKAPKLMIYYV | (Human) | (Human) | (Human) | (Human) | | DTITWGPIYYY |
| | | | SNRPSGVSNRFSGSKSGNTASLTISGL | | | | | | MDV |
| | | | QAEDEADYYCSSYTSSTLNVLFGGGTK | | | | | | |
| | | | LTVL | | | | | | |
| | COV2- | 1464 | DIQMTQSPSSLSASVGDRVTITCRARQ | IGHV2-5 | IGHJ3 | IGKV1-39 | IGKJ5 | 2473 | AHRLWFRDA |
| | 2337 | | SISNYLNWYQQKPGKAPKLLIYAASSL | (Human) | (Human) | (Human) | (Human) | | FDI |
| | | | HSGVPSRFSGSGSGTDFTLTISSLQPED | | | | | | |
| | | | FATYYCQQSYSTPGTFGQGTRLEIK | | | | | | |
| | COV2- | 1465 | QSVLTQPPSVSGAPGQRVTISCTGSSS | IGHV1-3 | IGHJ5 | IGLV1-40 | IGU1 | 2474 | AMGPSAFSW |
| | 2340 | | NIGAGYDVHWYQHLPGTAPKLLIYGN | (Human) | (Human) | (Human) | (Human) | | LDP |
| | | | SNRPSGVPDRFSGSKSGTSASLAITGL | | | | | | |
| | | | QAEDEADYYCQSYDSSLSGWSVFGTG | | | | | | |
| | | | TKVTVL | | | | | | |
| | COV2- | 1466 | QSALTQPASVSGSPGQSITISCTGTSSD | IGHV3- | IGHJ6 | IGLV2-14 | IGU1 | 2475 | ARSTSGSYYY |
| | 2341 | | VGDYNYVSWYQQHPGKAPKLMIYDV | 303 | (Human) | (Human) | (Human) | | GMDV |
| | | | SNRPSGVSNRFSGSKSGNTASLTISGL | (Human) | | | | | |
| | | | QAEDEAEYYCSSYTSSSTLLYVFGTGTK | | | | | | |
| | | | VTVL | | | | | | |
| | COV2- | 1467 | DIQMTQSPSSLSASVGDRVTITCRASQ | IGHV2-5 | IGHJ4 | IGKV1-39 | IGKJ2 | 2476 | AHRPPSYHG |
| | 2342 | | SISIYLNWYQQKPGKAPKLLIYAASTLQ | (Human) | (Human) | (Human) | (Human) | | WCYFDY |
| | | | SGVPSRFSGSGSGTDFTLTISSLQPEDF | | | | | | |
| | | | ATYYCQQSYSTHMSTFGQGTKLEIK | | | | | | |
| | COV2- | 1468 | DIVVTQTPLSLSVTPGQPASISCKSSET | IGHV1-18 | IGHJ4 | IGKV2D-29 | IGKJ5 | 2477 | ARVQRRRLDY |
| | 2343 | | LLHSDGKTYLSWYLQKPGQPPQLLIYEV | (Human) | (Human) | (Human) | (Human) | | |
| | | | SNRFSGVPDRFSGSGSGTDFTLKIGRV | | | | | | |
| | | | EAEDVGLYYCMQSIQLAFGQGTRLEIE | | | | | | |
| | COV2- | 1469 | EIVMTQSPATLSVSPGERATLSCRASQ | IGHV4-34 | IGHJ6 | IGKV3-15 | IGKJ4 | 2478 | ARPPQAARIH |
| | 2346 | | SVSSNLAWYQQKPGQAPRLLIYGAST | (Human) | (Human) | (Human) | (Human) | | YYYYMDV |
| | | | RATGIPARFSGSGSGTEFTLTISSLQSE | | | | | | |
| | | | DFAVYYCQQYNYWPPLTFGGGTKVEI | | | | | | |
| | | | K | | | | | | |
| | COV2- | 1470 | SSELTQDPAVSVALGQTVTITCQGDSL | IGHV5-51 | IGHJ4 | IGLV3-19 | IGU2 | 2479 | ARRFYGPSSF |
| | 2351 | | RSHYASWYKVKPGQAPLLVIYGRNNR | (Human) | (Human) | (Human) | (Human) | | DY |
| | | | PSGIPDRFSGSRSGNTASLTITGAQVD | | | | | | |
| | | | DEADYYCSSGDSSTDHHVVFAGGTKL | | | | | | |
| | | | AW | | | | | | |
| | COV2- | 1471 | DMEVTQFPSSLSASIGDRVTITCRATQ | IGHV1-46 | IGHJ4 | IGKV1-39 | IGKJ4 | 2480 | ARGGEWRIV |
| | 2352 | | SISTYLNWYQQKPGKAPNLLIYSASHL | (Human) | (Human) | (Human) | (Human) | | PGGRDYFDY |
| | | | QRGVPARFSGSGSGTEFTLTITTLQPE | | | | | | |
| | | | DVGTYYCHQSYGVPITFGGGTKVDIK | | | | | | |
| | COV2- | 1472 | EIVMTQSPATLSVSPGERATLSCRASQ | IGHV5-51 | IGHJ5 | IGKV3-15 | IGKJ2 | 2481 | ARLGVSKYCS |
| | 2353 | | SVSSNLAWYQQKPGQAPRLLIYGAST | (Human) | (Human) | (Human) | (Human) | | GGRCLSGGS |
| | | | RATGIPARFSGSGSGTEFTLTISSLQSE | | | | | | NWFDP |
| | | | DFAVYYCQQYNNWPPMYTFGQGTKL | | | | | | |
| | | | EIK | | | | | | |
| | COV2- | 1473 | NFMLTQPHSVSESPGKTVTISCTGSSG | IGHV3-53 | IGHJ3 | IGLV6-57 | IGU2 | 2482 | ASSSWLRGAF |
| | 2354 | | SIASNYVQWYQQRPGSAPTTVIYEDN | (Human) | (Human) | (Human) | (Human) | | DI |
| | | | QRPSGVPDRFSGSIDSSSNSASLTISGL | | | | | | |
| | | | KTEDEADYYCQSYDSSKYVVFGGGTKL | | | | | | |
| | | | TVL | | | | | | |
| | COV2- | 1474 | EIVLTQSPGTLSLSPGERATLSCRASQS | IGHV1-58 | IGHJ3 | IGKV3-20 | IGKJ1 | 2483 | AAPHCNRTSC |
| | 2355 | | VSSSYLGWYQQKPGQAPRLLIYGASSR | (Human) | (Human) | (Human) | (Human) | | YDAFDL |
| | | | ATGIPDRFSGSGSGTDFTLTISRLEPED | | | | | | |
| | | | FAVYYCQQYGSSPWTFGQGTKVEIK | | | | | | |
| | COV2- | 1475 | DIVMTQSPLSLPVTPGEPASISCRSSQS | IGHV3-49 | IGHJ6 | IGKV2-28 | IGKJ2 | 2484 | SRVRGSFYGS |
| | 2357 | | LLHSNGYNYLDWYLQKPGQSPQLLIYL | (Human) | (Human) | (Human) | (Human) | | VGKNYGMDV |
| | | | GSTRASGVPDRFSGSGSGTDFTLKISR | | | | | | |
| | | | VEAEDVGVYYCMQALQTPLYTFGQGT | | | | | | |
| | | | KLEIK | | | | | | |
| | COV2- | 1476 | DIQMTQSPSSLSACVGDRVTITCRASQ | IGHV3- | IGHJ4 | IGKV1-39 | IGKJ5 | 2485 | ARDIDSGYDP |
| | 2358 | | SISSYLNWYQQKPGKGPKLLIYAASSLQ | 303 | (Human) | (Human) | (Human) | | TPVFDY |
| | | | SGVPSRFSGSGSGTDFTLTISSLQPEDF | (Human) | | | | | |
| | | | ATYYCQQSYSSLSITFGQGTRLEIK | | | | | | |
| | COV2- | 1477 | EIVLTQSPATLSLSPGERATLSCRASQS | IGHV1-69 | IGHJ4 | IGKV3-11 | IGKJ4 | 2486 | ARTSHYDSSG |
| | 2367 | | VSSYLAWYQQKPGQAPRLLIYDASNR | (Human) | (Human) | (Human) | (Human) | | SYFEY |
| | | | ATGIPARFSGSGSGTDFTLTISSLDPED | | | | | | |
| | | | FAVYYCHKRSNWPPSLTFGGGTKVEIK | | | | | | |
| | COV2- | 1478 | SNELTQPPSVSVSPGQTARITCSGDAL | IGHV5-51 | IGHJ6 | IGLV3-25 | IGU2 | 2487 | ARRRGGIGIE |
| | 2368 | | PKQYAYWYQQKPGQAPVLVIYKDTER | (Human) | (Human) | (Human) | (Human) | | YGMDV |
| | | | PSGIPERFSGSSSGTTVTLTISGVQAED | | | | | | |
| | | | EADYYCQSTASSGTYVVFGGGTKLTVL | | | | | | |
| | COV2- | 1479 | DIQMTQSPSTLSASVGDRVTITCRASQ | IGHV3-30 | IGHJ4 | IGKV1-5 | IGKJ1 | 2488 | AKDFGGDNT |
| | 2369 | | SISSWLAWYQQKPGKAPKLLIYKASSL | (Human) | (Human) | (Human) | (Human) | | AMVEYFFDF |
| | | | ESGVPSRFSGSGSGTEFTLTISSLQPDD | | | | | | |
| | | | FATYYCQQYNSYSPTFGQGTKVEIK | | | | | | |
| | COV2- | 1480 | NFMLTQPHSVSESPGKTVTFSCTGSSG | IGHV4-61 | IGHJ4 | IGLV6-57 | IGU2 | 2489 | AGSPVPPTIV |
| | 2370 | | SIASNYVQWYQQRPGSAPTTVIYEDN | (Human) | (Human) | (Human) | (Human) | | GASY |
| | | | QRPSGVPDRFSGSIDSSSNSASLTISGL | | | | | | |
| | | | KTEDEADYYCQSYDGINRWLVFGGGT | | | | | | |
| | | | KLTVL | | | | | | |
| | COV2- | 1481 | EIVMTQSPATLSVSPGERATLSCRASQ | IGHV3-30 | IGHJ4 | IGKV3-15 | IGKJ1 | 2490 | AKGRGNYLTF |
| | 2371 | | SVSSNLAWYQQKPGQAPRLLIYGAST | (Human) | (Human) | (Human) | (Human) | | FDS |
| | | | RATGIPARFSGSGSGTEFTLTISSLQSE | | | | | | |
| | | | DFAVYYCQQYNNWPGTFGQGTKVEI | | | | | | |
| | | | K | | | | | | |
| | COV2- | 1482 | EIVLTQSPGTLSLSPGERATLSCRASQS | IGHV3-66 | IGHJ6 | IGKV3-20 | IGKJ2 | 2491 | ARDPGSRYSG |
| | 2373 | | VSSSYLAWYQQKPGQAPRLLIYGASSR | (Human) | (Human) | (Human) | (Human) | | GWYDYYYAM |
| | | | ATGIPDRFSGSGSGTDFTLTISRLEPED | | | | | | DV |
| | | | FAVYYCQQYGSSPPYTFGQGTKLEIK | | | | | | |
| | COV2- | 1483 | QPVLTQPPSASASLGASVTLTCTLSSGY | IGHV5-51 | IGHJ4 | IGLV9-49 | IGU2 | 2492 | ARRDTDFDY |
| | 2378 | | SNYKVDWFQQRPGKGPRFVMRVGT | (Human) | (Human) | (Human) | (Human) | | |
| | | | GGIVGSKGDGIPDRFSVLGSGLNRYLTI | | | | | | |
| | | | KNIQEEDESDYHCGADHGSGSNFVYV | | | | | | |
| | | | VFGGGTKLTVL | | | | | | |
| | COV2- | 1484 | EVVLTQSPGTLSLSPGERATLSCRASQS | IGHV1-58 | IGHJ3 | IGKV3-20 | IGKJ1 | 2493 | AAPYCSRTSC |
| | 2381 | | VSSSYLAWYQQKPGQAPRLLIYGASSR | (Human) | (Human) | (Human) | (Human) | | HDAFDI |
| | | | ATGIPDRFSGSGSGTDFTLTISRLEPED | | | | | | |
| | | | FAVYHCQHFGSSSQWTFGQGTKVEIK | | | | | | |
| | COV2- | 1485 | QTVVTQEPSLTVSPGGTVTLTCASSTG | IGHV3-30 | IGHJ4 | IGLV7-43 | IGU3 | 2494 | AKDLPPYASG |
| | 2382 | | AVTSGYFPNWFQQKPGQAPRALIFST | (Human) | (Human) | (Human) | (Human) | | WYEGGFDY |
| | | | NNRHSWTPARFSGSLLGDKAALTLSG | | | | | | |
| | | | VQPEDEAEYYCLLYYGGPWVFGGGTK | | | | | | |
| | | | LTVL | | | | | | |
| | COV2- | 1486 | EIVMTQSPGTLSVSPGERATLSCRASQ | IGHV3-30 | IGHJ4 | IGKV3-15 | IGKJ1 | 2495 | AQGRGGYYS |
| | 2383 | | TLSSNLAWYQQKPGQAPRLLIYGASTR | (Human) | (Human) | (Human) | (Human) | | PFDD |
| | | | ATGIPARFSGSGSGTEFTLTISSLQSED | | | | | | |
| | | | FAVYHCQQYNNWPLAFGQGTKVEIK | | | | | | |
| | COV2- | 1487 | QSALTQPASVSGSPGQSITISCTGTSSD | IGHV2-26 | IGHJ2 | IGLV2-23 | IGU2 | 2496 | ARTTWGTWI |
| | 2384 | | IGSYNLVSWYQQYPGKAPKLMIYEVSK | (Human) | (Human) | (Human) | (Human) | | QAWYFDI |
| | | | RPSGVSNRFSGSKSGNTASLTISGLQA | | | | | | |
| | | | EDEADYYCCSYAGGNTFVVFGGGTKL | | | | | | |
| | | | TVL | | | | | | |
| | COV2- | 1488 | EIVMTQSPATLSVSPGERATLSCRASQ | IGHV3-33 | IGHJ5 | IGKV3-15 | IGKJ1 | 2497 | AREGDFWSG |
| | 2386 | | SVSSNLAWYQQKPGQAPRLLIYGAST | (Human) | (Human) | (Human) | (Human) | | YYTGWFDP |
| | | | RATGIPARFSGSGSGTEFTLTISSLQSE | | | | | | |
| | | | DFAVYYCQQYNNWPRTFGQGNRVEI | | | | | | |
| | | | N | | | | | | |
| | COV2- | 1489 | QSALTQPASVSGSPGQSITISCTGTSSD | IGHV3-30 | IGHJ4 | IGLV2-14 | IGU2 | 2498 | AKDLTIVVIPA |
| | 2387 | | VGGYNYVSWYQQHPGKAPKLMIYDV | (Human) | (Human) | (Human) | (Human) | | APNFDY |
| | | | SNRPSGVSNRFSGSRSGNTASLTISGL | | | | | | |
| | | | QAEDEADYYCSSYTSSSTPVVFGGGTK | | | | | | |
| | | | LTVL | | | | | | |
| | COV2- | 1490 | DIVMTQSPLSLPVTPGEPASISCRSSQS | IGHV3-23 | IGHJ6 | IGKV2-28 | IGKJ1 | 2499 | AKDQARVQD |
| | 2388 | | LLHSNGYNYLDWYLQKPGQSPHLLIYL | (Human) | (Human) | (Human) | (Human) | | YIWGSYRSYG |
| | | | GSNRASGVPDRFSGSGSGTDFTLKISR | | | | | | MDV |
| | | | VEAEDVGVYYCMQALQTPRTFGQGT | | | | | | |
| | | | KVEIK | | | | | | |
| | COV2- | 1491 | DIQMTQSPSSLSASVGDRVTITCRASQ | IGHV3-9 | IGHJ6 | IGKV1-39 | IGKJ1 | 2500 | AKDIIRQGED |
| | 2389 | | NIASYLNWYQQKPGKAPKLLIYAASSL | (Human) | (Human) | (Human) | (Human) | | GMDV |
| | | | QSGVPSRFSGSGSGTDFTLTISSLQPEE | | | | | | |
| | | | FATYYCQQSYSTPWTFGQGTKVEIK | | | | | | |
| | COV2- | 1492 | QSVLTQAPSASGTPGQRVTISCSGSNS | IGHV1-8 | IGHJ4 | IGLV1-44 | IGU2 | 2501 | ARMRSGWPT |
| | 2391 | | NIGSYTINWYQQLPGTAPKLLIYGNDQ | (Human) | (Human) | (Human) | (Human) | | HGRPDDF |
| | | | RTSGVPDRFSGSKFGTSASLAISGLQSE | | | | | | |
| | | | DENNYYCAVWDDSLNGLVFGGGTKL | | | | | | |
| | | | TVL | | | | | | |
| | COV2- | 1493 | EIVMTQSPATLSVSPGERATLSCRASQ | IGHV3-21 | IGHJ6 | IGKV3-15 | IGKJ1 | 2502 | ARWLQLRSD |
| | 2394 | | SVSNNLAWYQHKPGQAPRLLIYGAST | (Human) | (Human) | (Human) | (Human) | | YYYFGMDV |
| | | | RATGIPARFSGSGSGTEFTLTISSLQSE | | | | | | |
| | | | DFAVYFCQQCYNWPPWTFGQGTKVE | | | | | | |
| | | | IK | | | | | | |
| | COV2- | 1494 | SYELTQPPSVSVSPGQTASITCSGDKLG | IGHV3-7 | IGHJ4 | IGLV3-1 | IGU1 | 2503 | ARLSGSSWDF |
| | 2397 | | DKYACWYQQRPGQSPVLVIYQDSKRP | (Human) | (Human) | (Human) | (Human) | | DY |
| | | | SGIPERFSGSNSGNTATLTISGTQAMD | | | | | | |
| | | | EADYYCQAWDSSTGVFGTGTKVTVL | | | | | | |
| | COV2- | 1495 | DIQMTQSPSSLSASVGDRVTITCQASQ | IGHV3-66 | IGHJ4 | IGKV1-33 | IGKJ1 | 2504 | ARDYRDWI |
| | 2399 | | DISKYLNWYQQKPGKAPKLLIYDASNL | (Human) | (Human) | (Human) | (Human) | | |
| | | | ERGVPSRFSGSGSGTDFTFTISSLQAED | | | | | | |
| | | | IATYYCQQYHNLPRTFGQGTKVEIK | | | | | | |
| | COV2- | 1496 | DIQLTQSPSFLSASVRDRVTITCRASQG | IGHV2-5 | IGHJ4 | IGKV1-9 | IGKJ3 | 2505 | AHNRFQYCSS |
| | 2400 | | ISSYLAWYQQKPGKAPKLLIYAASTLQS | (Human) | (Human) | (Human) | (Human) | | TTCYTLLPFDY |
| | | | GVPSRFSGSGSGTEFTLTISSLQPEDFA | | | | | | |
| | | | TYYCQQLNSYPFTFGPGTKVDIK | | | | | | |
| | COV2- | 1497 | DIVMTQSPDSLAVSLGERATINCKSSQ | IGHV3-30 | IGHJ6 | IGKV4-1 | IGKJ1 | 2506 | ARPYTGSYKS |
| | 2401 | | SVLYSSNNKNSLAWYQQKPGQPPKLLI | (Human) | (Human) | (Human) | (Human) | | YMDV |
| | | | YWASTRESGVPDRFSGSGSGTDFTLTI | | | | | | |
| | | | SSLQAEDVAVYYCQQYYSISWTFGQG | | | | | | |
| | | | TKVEIK | | | | | | |
| | COV2- | 1498 | QSALTQPASVSGSPGQSITISCTGTSSD | IGHV3-30 | IGHJ5 | IGLV2-14 | IGU1 | 2507 | ARGDGDVYN |
| | 2403 | | VGGYNYVSWYQQHPGKAPKLMIYDV | (Human) | (Human) | (Human) | (Human) | | FLLVRNWFDP |
| | | | GNRPSGVSNRFSGSKSGNTASLTISGL | | | | | | |
| | | | QAEDEADYYCSSYTSSSTLYVFGTGTKV | | | | | | |
| | | | TVL | | | | | | |
| | COV2- | 1499 | DIQMTQSPSSLSASVGDRVTFTCRASQ | IGHV4-39 | IGHJ4 | IGKV1-27 | IGKJ1 | 2508 | ASLWFGDLYS |
| | 2405 | | GISNYLAWYQQKPGKVPKLLIYAASTL | (Human) | (Human) | (Human) | (Human) | | FDY |
| | | | QSGVPSRFSGIGSGTDFTLTISSLQPED | | | | | | |
| | | | VATYYCQKYNSAPWTFGQGTKVEIK | | | | | | |
| | COV2- | 1500 | SYELTQPPSVSVSPGQTASITCSGDKLG | IGHV3-7 | IGHJ4 | IGLV3-1 | IGU2 | 2509 | ARLGRSSWN |
| | 2406 | | DKFVCWYQQKPGQSPVLVIYQDNKR | (Human) | (Human) | (Human) | (Human) | | FDY |
| | | | PSGIPERFSGSNSGNTATLTISGTQALD | | | | | | |
| | | | EADYYCQAWDSSTGVFGGGTKLTVL | | | | | | |
| | COV2- | 1501 | DIQLTQSPSFLSASVGDRVTITCRASQG | IGHV4-61 | IGHJ6 | IGKV1-9 | IGKJ5 | 2510 | ARVGGISPYY |
| | 2408 | | ISSYLAWYQQKPGKAPKLLMYAASTL | (Human) | (Human) | (Human) | (Human) | | YYYYMDV |
| | | | QSGVPSRFSGSGSGTEFTLTINTLQPE | | | | | | |
| | | | DFATYYCQQLNSYPITFGQGTRLEIK | | | | | | |
| | COV2- | 1502 | QSVLTQPPSASGTPGQRVTFSCSGSNS | IGHV1-8 | IGHJ4 | IGLV1-44 | IGU3 | 2511 | ARMRSGWPT |
| | 2413 | | NIGSYTVNWYQQLPGTAPKLLIYDNN | (Human) | (Human) | (Human) | (Human) | | HGRPDDY |
| | | | QRPSGVPDRFSGSKSGTSASLAISGLQ | | | | | | |
| | | | SEDEADYYCAVWDDSLNGLVFGGGT | | | | | | |
| | | | KLTVL | | | | | | |
| | COV2- | 1503 | QSVLTQPPSVSEAPRQRVTISCSGSSS | IGHV4-31 | IGHJ4 | IGLV1-36 | IGU2 | 2512 | ASAKLVATISY |
| | 2416 | | NIGNNAVNWYQQLPGKAPKLLIYYDD | (Human) | (Human) | (Human) | (Human) | | FDY |
| | | | LLPSGVSDRFSGSKSGTSASLAISGLQS | | | | | | |
| | | | EDEADYYCAAWDDSLNGVVFGGGTK | | | | | | |
| | | | LTVL | | | | | | |
| | COV2- | 1504 | DIQMTQSPSSLSASVGDRVTITCRASQ | IGHV4-34 | IGHJ6 | IGKV1-39 | IGKJ4 | 2513 | ARVGGYYYYY |
| | 2417 | | SITSYLNWYQQRPGKAPKLLIYAASSLQ | (Human) | (Human) | (Human) | (Human) | | MDV |
| | | | SGVPSRFSGSGSGTDFTLSISSLQPEDF | | | | | | |
| | | | ATYYCQQSYTTLLTFGGGTKVEIK | | | | | | |
| | COV2- | 1505 | QSALTQPASVSGSPGQSITISCTGTSSD | IGHV3-23 | IGHJ6 | IGLV2-14 | IGU3 | 2514 | AKPYGMDV |
| | 2418 | | VGGYNFVSWHQQHPGKAPKNMIYD | (Human) | (Human) | (Human) | (Human) | | |
| | | | VSKRPSGVSNRFSGSKSGNTASLTISGL | | | | | | |
| | | | HTEDEADYYCSSYTSTSTPWVFGGGTK | | | | | | |
| | | | LTVL | | | | | | |
| | COV2- | 1506 | EIVMTQSPGTLSVSPGERATLSCRASQ | IGHV3-30 | IGHJ3 | IGKV3-15 | IGKJ5 | 2515 | ARDRSNLERL |
| | 2420 | | SLSSHLAWYQQKPGQAPRLLIYGVSTR | (Human) | (Human) | (Human) | (Human) | | VMTFGGIIAG |
| | | | ATGIPARFSGSGSGTEFTLAISSLQSED | | | | | | AFDI |
| | | | SAVYYCQQYHVWPPITFGQGTRLEIK | | | | | | |
| | COV2- | 1507 | DIVMTQSPDSLAVSLGERATINCKSSQ | IGHV3-30 | IGHJ4 | IGKV4-1 | IGKJ1 | 2516 | ARVNSGSYYS |
| | 2422 | | SVLYSSNNKNYLAWYQQKPGQPPKLLI | (Human) | (Human) | (Human) | (Human) | | YFDY |
| | | | YWASTRESGVPDRFSGSGSGTDFTLTI | | | | | | |
| | | | SSLQAEDVAVYYCQQYYSTPLTFGQGT | | | | | | |
| | | | KVEIK | | | | | | |
| | COV2- | 1508 | DIQMTQSPSSVSASVGDRVTITCRASQ | IGHV4-4 | IGHJ4 | IGKV1-12 | IGKJ4 | 2517 | ASRWGDYFD |
| | 2427 | | GISSWLAWYQQKPGKAPKLLIYAASSL | (Human) | (Human) | (Human) | (Human) | | SSGAYDS |
| | | | QSGVPSRFSGSGSGTDFTLTITSLQPED | | | | | | |
| | | | FATYYCQQGNSFPLTFGGGTKVEIK | | | | | | |
| | COV2- | 1509 | QSVLTQPPSVSGAPGQRVTISCTGSSS | IGHV3-33 | IGHJ4 | IGLV1-40 | IGU3 | 2518 | ARKGPLWRF |
| | 2428 | | NIGAGYDVHWYQQIPGTAPKLLFYGN | (Human) | (Human) | (Human) | (Human) | | DY |
| | | | NNRPSGVPDRFSDSKSGTSASLAITGL | | | | | | |
| | | | QAEDEADYYCQSYDSSLSAWVFGGGT | | | | | | |
| | | | KLTVL | | | | | | |
| | COV2- | 1510 | DIQMTQSPSTLSASVGDRVTITCRASH | IGHV3-53 | IGHJ4 | IGKV1-5 | IGKJ1 | 2519 | ARESTQ |
| | 2429 | | SISSWLAWYQQKPGKAPKLLIYKASSL | (Human) | (Human) | (Human) | (Human) | | |
| | | | ESGVPSRFSGSGSGTEFTLTISSLQPDD | | | | | | |
| | | | FATYYCQQYNTYSQTFGQGTKVEIK | | | | | | |
| | COV2- | 1511 | EIVLTQSPATLSLSPGERATLSCRASQS | IGHV4-39 | IGHJ6 | IGKV3-11 | IGKJ5 | 2520 | ARAPFQLLDK |
| | 2430 | | VSSYLAWYQQKPGQAPRLLIYDASNR | (Human) | (Human) | (Human) | (Human) | | YYFFYYMDV |
| | | | ATGIPARFSGSGSGTDFTLTISSLEPED | | | | | | |
| | | | FAVYYCQQRSNWPPGVTFGQGTRLEIK | | | | | | |
| | COV2- | 1512 | DIQMTQSPSSLSASVGDRVTITCQASQ | IGHV3-53 | IGHJ4 | IGKV1-33 | IGKJ2 | 2521 | ARHIPAWGY |
| | 2434 | | DIRNYLNWYQQKPGKAPELLIYDASNL | (Human) | (Human) | (Human) | (Human) | | K |
| | | | ETGVPSRFSGSGSGTDFIFTISSLQPED | | | | | | |
| | | | IATYYCHQYDYLPYTFGQGTKLDIK | | | | | | |
| | COV2- | 1513 | DIQMTQSPSSLSASVGDRVTITCRASQ | IGHV3-23 | IGHJ3 | IGKV1-39 | IGKJ2 | 2522 | AKLLGSGITLD |
| | 2438 | | SISSYLNWYQQKPGKAPKLLIYAATSLQ | (Human) | (Human) | (Human) | (Human) | | NDAFDI |
| | | | SGVPSRFSGSGSGTDFTLTISSLQPEDF | | | | | | |
| | | | ATYYCQQTYSTPLYTFGQGTKLEIK | | | | | | |
| | COV2- | 1514 | EIVLTQSPATLSLSPGERATLSCRASQS | IGHV1-69 | IGHJ4 | IGKV3-11 | IGKJ3 | 2523 | ARIGHFDSSG |
| | 2441 | | VSSFLAWYQQKPGQAPRLLIYDASNR | (Human) | (Human) | (Human) | (Human) | | YYLDY |
| | | | PTGIPARFTGSGSGTDFTLTISSLEPED | | | | | | |
| | | | FAVYYCQHRTNWPPLFTFGPGTKVDIK | | | | | | |
| | COV2- | 1515 | SYELTQPPSVSVSPGQTARITCSGDALP | IGHV3-23 | IGHJ4 | IGLV3-25 | IGU2 | 2524 | AKDFGSGIVG |
| | 2444 | | NQYAYWYQQKPGQAPVLVMCKDSE | (Human) | (Human) | (Human) | (Human) | | ATGFDF |
| | | | RPSGIPERFSGSSSGTTVTLTISGVQAE | | | | | | |
| | | | DEADYYCQSADSSGTYVVFGGGTKLT | | | | | | |
| | | | VL | | | | | | |
| | COV2- | 1516 | DIQMTQSPSTLSASVGDRVTITCRASQ | IGHV3-20 | IGHJ6 | IGKV1-5 | IGKJ1 | 2525 | ARRRSSSRYSS |
| | 2445 | | SVSTWLAWYQQKPGKAPNLLIYEASSL | (Human) | (Human) | (Human) | (Human) | | GWYMYYYY |
| | | | ESGVPSRFSGSGSGTEFTLTISSLQPDD | | | | | | MDV |
| | | | FATYYCQQYNTYSQTFGQGTKVEIK | | | | | | |
| | COV2- | 1517 | QPVLTQPPSASASLGASVTLTCTLSSGY | IGHV5-51 | IGHJ4 | IGLV9-49 | IGU2 | 2526 | ATHRCSGGFC |
| | 2446 | | SNYKVDWYQQRPGKGPRFVMRVGT | (Human) | (Human) | (Human) | (Human) | | YLAY |
| | | | GGIVGSKGDGIPDRFSVLGSGLNRYLTI | | | | | | |
| | | | KNIQEEDESDYHCGADHGSGSNFVFV | | | | | | |
| | | | VFGGGTKLTVL | | | | | | |
| | COV2- | 1518 | DIVMTQSPDSLAVSLGERATINCKSSQ | IGHV3-30 | IGHJ1 | IGKV4-1 | IGKJ1 | 2527 | ARASYNSNW |
| | 2449 | | SLLYTSNNKNYLAWYQQKPGQPPKLLI | (Human) | (Human) | (Human) | (Human) | | SIGEYFRD |
| | | | YWASTRESGVPDRFSGSGSGTDFTLTI | | | | | | |
| | | | SSLQAEDVAVYYCQQYYSPPWTFGQG | | | | | | |
| | | | TKVEIK | | | | | | |
| | COV2- | 1519 | DIQMTQSPSSLSASVGDRVTITCQASQ | IGHV3-30 | IGHJ4 | IGKV1-33 | IGKJ5 | 2528 | AKQGGLYCSG |
| | 2450 | | DISNYLHWYQQKPGKAPKLLIYDASNL | (Human) | (Human) | (Human) | (Human) | | TNCWGGYLD |
| | | | ETGVPSRFSGSGSGTDFTFTISSLQPED | | | | | | Y |
| | | | IATYYCQQYHNLPPITFGQGTRLEIK | | | | | | |
| | COV2- | 1520 | SYELTQPPSVSVSPGQTASITCSGDKLG | IGHV2-5 | IGHJ4 | IGLV3-1 | IGU1 | 2529 | VHRHVSGAF |
| | 2451 | | ETYVSWYQQKPGQSPVLVIYEDSKRPS | (Human) | (Human) | (Human) | (Human) | | DY |
| | | | GIPERFSGSNSGNTATLTISGTQAMDE | | | | | | |
| | | | ADYYCQAWDSSTGGVFGTGTKVTVL | | | | | | |
| | COV2- | 1521 | DIQMTQSPSSLSASVGDRVTITCQASL | IGHV7-4- | IGHJ3 | IGKV1-33 | IGKJ5 | 2530 | ARARLLGYCS |
| | 2453 | | DISKYLNWYQHKPGKAPNLLIYDAFNL | 1 | (Human) | (Human) | (Human) | | STSCYTIGWG |
| | | | ERGVPSRFSGSGSGTDFTFTISSLQPED | (Human) | | | | | AFDI |
| | | | IATYYCQQYDNLPPGVSTTFGQGTRLE | | | | | | |
| | | | IK | | | | | | |
| | COV2- | 1522 | SYELTQPPSVSVSPGQTARITCSGDALP | IGHV3-33 | IGHJ4 | IGLV3-10 | IGU3 | 2531 | AREGQGTYLD |
| | 2454 | | KKYAHWYQQKSGQAPVLVIYEDSKRP | (Human) | (Human) | (Human) | (Human) | | Y |
| | | | SGIPERFSGSSSGTMATLTISGAQVED | | | | | | |
| | | | EADYYCCSTDSSGNQRVFGGGTKLTVL | | | | | | |
| | COV2- | 1523 | QSALTQPASVSGSPGQSITISCTGTSSD | IGHV3-48 | IGHJ4 | IGLV2-14 | IGU2 | 2532 | AREARSRYFD |
| | 2455 | | IGGYNYVSWYQQHPGKAPKLLIYDVS | (Human) | (Human) | (Human) | (Human) | | WLPSYYFDY |
| | | | NRPSGVSTRFSGSKSGNTASLTISGLQ | | | | | | |
| | | | AEDEADYYCSSYTSSSTHVVFGGGTKL | | | | | | |
| | | | TVL | | | | | | |
| | COV2- | 1524 | SYELTQPPSVSVSPGQTARITCSGDALP | IGHV3-30 | IGHJ4 | IGLV3-25 | IGU2 | 2533 | ARDPSPLVLIT |
| | 2458 | | RQYTYWYQQKPGQAPVLVIYKDSERP | (Human) | (Human) | (Human) | (Human) | | SIDY |
| | | | SGIPERFSGSSSGTTVTLTISGVQAEDE | | | | | | |
| | | | ADYYCQSADTIGTYWVFGGGTKLTVL | | | | | | |
| | COV2- | 1525 | EIVMTQSPATVSVSPGERATLSCRASQ | IGHV4-39 | IGHJ5 | IGKV3-15 | IGKJ2 | 2534 | ARRGNYYDSK |
| | 2459 | | SVSSNLAWYQQKPGQAPRLLIYGAST | (Human) | (Human) | (Human) | (Human) | | NWFDP |
| | | | RATGIPARFSASGSGTEFTLTISSLQSE | | | | | | |
| | | | DFAVYYCQQYNNWPPMYTFGQGTKVE | | | | | | |
| | | | IK | | | | | | |
| | COV2- | 1526 | DIQMTQSPSSLSASVGDRVTITCQASQ | IGHV4-31 | IGHJ4 | IGKV1-33 | IGKJ2 | 2535 | ARGGSGSYSL |
| | 2461 | | DITNYLNWYQQKPGKAPKLLIYDASNL | (Human) | (Human) | (Human) | (Human) | | FDY |
| | | | ETGVPSRFSGSGSGTDFTFTISSLQPED | | | | | | |
| | | | FATYYCQQYDNLYSVHFGQGTKLEIK | | | | | | |
| | COV2- | 1527 | DIQMTQSPSSLSASVGDRVTITCRASQ | IGHV3-13 | IGHJ5 | IGKV1-39 | IGKJ1 | 2536 | ARVLYDSSGF |
| | 2462 | | SISSYLNWYQQKPGKAPKLLIYAASSLK | (Human) | (Human) | (Human) | (Human) | | YNWFDP |
| | | | SGVPSRFGGSGSGTDFTLTISSLQPEDF | | | | | | |
| | | | ATYYCQQSYEMPPWTFGQGTKVEIE | | | | | | |
| | COV2- | 1528 | SYELTQPPSVSVSPGQTARITCSGDALP | IGHV4-31 | IGHJ2 | IGLV3-25 | IGU1 | 2537 | ARDLGDGYN |
| | 2464 | | NQYAYWYHQKPGQAPVVVIYKDSER | (Human) | (Human) | (Human) | (Human) | | LRVPAYFDL |
| | | | PSGIPQRFSGSSSGTTVTLTISGVQAED | | | | | | |
| | | | EADYYCQSADSSGYVFGTGTKVTVL | | | | | | |
| | COV2- | 1529 | QSALTQPASVSGSPGQSITISCTGTSSD | IGHV4-4 | IGHJ4 | IGLV2-14 | IGU1 | 2538 | ARVDHVNVR |
| | 2465 | | VGGYNYVSWYQQHPGKAPKLMIYDV | (Human) | (Human) | (Human) | (Human) | | DY |
| | | | SKRPSGVSNRFSGSKSGNTASLTISGLQ | | | | | | |
| | | | AEDEADYYCSSYTSSSIPYVFGTGTKVT | | | | | | |
| | | | VL | | | | | | |
| | COV2- | 1530 | EIVLTQSPAILSLSPGERATLSCRASQS | IGHV3-21 | IGHJ6 | IGKV3-11 | IGKJ1 | 2539 | ARVNGNSN |
| | 2466 | | VSSYLAWYQQKPGQAPRLLIYDTSNRAT | (Human) | (Human) | (Human) | (Human) | | WNFGSYYYYY |
| | | | GIPARFSGSGSGTDFTLTISSLEPEDFA | | | | | | MDV |
| | | | FYYCQQRGNWWTFAQGTKVEIK | | | | | | |
| | COV2- | 1531 | SYELTQPPSVSVSPRQTARITCSGDALP | IGHV3-33 | IGHJ4 | IGLV3-10 | IGU3 | 2540 | AREGQMAAT |
| | 2473 | | KKYAYWYQQKSGQAPVLVIYEDSKRP | (Human) | (Human) | (Human) | (Human) | | TGIDY |
| | | | SGIPERFSGSSSGTMATLTISGAQVED | | | | | | |
| | | | EADYYCYSTDTSGNHWVFGGGTKLTV | | | | | | |
| | | | L | | | | | | |
| | COV2- | 1532 | SYELTQPPSVSVSPGQTARITCSGDALP | IGHV3-15 | IGHJ3 | IGLV3-10 | IGU3 | 2541 | TTLTYYYDSSA |
| | 2474 | | KKYAYWYQQKSGQAPVLVISEDSKRP | (Human) | (Human) | (Human) | (Human) | | YLNDAFDI |
| | | | SGIPERFSGSSSGTVATLTISGAQVEDE | | | | | | |
| | | | ADYYCYSTDSSGNHRVFGGGTKLTVL | | | | | | |
| | COV2- | 1533 | EIVLTQSPGTLSLSPGERATLSCRASQS | IGHV3-9 | IGHJ4 | IGKV3-20 | IGKJ2 | 2542 | AKGIYYDIFM |
| | 2478 | | VSSTFLAWYQQKPGQAPRLLIFGASSR | (Human) | (Human) | (Human) | (Human) | | PLLD |
| | | | ATGIPDRFSGSGSGTDFTLTISRLEPED | | | | | | |
| | | | FAVYYCHQYGTSPYTFGQGTKLEIK | | | | | | |
| | COV2- | 1534 | EIVMTQSPATLSVSPGERVTLSCRASQ | IGHV1-69 | IGHJ5 | IGKV3-15 | IGKJ4 | 2543 | ARGVVAATP |
| | 2479 | | SVSSNLAWYQQKPGQAPRLLIYGAST | (Human) | (Human) | (Human) | (Human) | | GWFDP |
| | | | RATGIPARFSGGGSGTEFTLTISSLQSE | | | | | | |
| | | | DFAVYYCQQYNNFLTFGGGTKVEIK | | | | | | |
| | COV2- | 1535 | DIVMTQSPDSLAVSLGERATINCKSSQ | IGHV1-69 | IGHJ5 | IGKV4-1 | IGKJ2 | 2544 | ARGWFGELL |
| | 2481 | | SVLYSSNNKNYLAWYQQKPGQPPKLLI | (Human) | (Human) | (Human) | (Human) | | KGTYWFDP |
| | | | YWASTRESGVPDRFSGSGSGTDFTLTI | | | | | | |
| | | | SSLQAEDVAVYYCQQYYSTPGFGQGT | | | | | | |
| | | | KLEIK | | | | | | |
| | COV2- | 1536 | QSVLTQPPSVSGAPGQRVTLSCTGSNS | IGHV1-69 | IGHJ2 | IGLV1-40 | IGU3 | 2545 | ARVGVSGFKS |
| | 2485 | | NIGAGYDVHWYQQLPGTAPKLLIYGN | (Human) | (Human) | (Human) | (Human) | | GSNWYFDL |
| | | | SNRPSGVPDRFSGSKSGTSASLAITGL | | | | | | |
| | | | QAEDEADYYCQSYDSSLSDSVFGGGT | | | | | | |
| | | | KVTVL | | | | | | |
| | COV2- | 1537 | SYELTQPPSVSVSPGQTARITCSGDALP | IGHV3-74 | IGHJ4 | IGLV3-25 | IGU3 | 2546 | AREVEQLAH |
| | 2488 | | NQYAYWYQQKPGQAPVLVIYKDSERP | (Human) | (Human) | (Human) | (Human) | | MVDY |
| | | | SGIPERFSGSSSGTTVTLTISGVQAEDE | | | | | | |
| | | | ADYYCQSADSSGTSWVFGGGTKLTVL | | | | | | |
| | COV2- | 1538 | EIVLTQSPGTLSLSPGERASLSCRASQS | IGHV4-39 | IGHJ2 | IGKV3-20 | IGKJ4 | 2547 | ARQWKWFG |
| | 2489 | | VSSSYLAWYQQKPGQAPRLLIYGASSR | (Human) | (Human) | (Human) | (Human) | | EAWYFDL |
| | | | ATGIPDRFSGSGSGTDFTLTISRLEPED | | | | | | |
| | | | FAVYYCQQYGSSPFTFGGGTKVEIK | | | | | | |
| | COV2- | 1539 | DIQMTQSPSTLSASVGDRVTITCRASQ | IGHV3-7 | IGHJ4 | IGKV1-5 | IGKJ4 | 2548 | ARDPYDLYGD |
| | 2490 | | SISSWLAWYQQKPRKAPKLLIYKASTLE | (Human) | (Human) | (Human) | (Human) | | YGGTFDY |
| | | | SGVPSRFSGSGSGTEFTLTISSLQPDDF | | | | | | |
| | | | ATYYCQQYNSYSLTFGGGTKVEIK | | | | | | |
| | COV2- | 1540 | EIVLTQSPATLSVSPGERATLSCRASQS | IGHV1-69 | IGHJ6 | IGKV3-15 | IGKJ1 | 2549 | AREDYYGSGS |
| | 2495 | | VSSNLAWYQQKPGQAPRLLIYGASTR | (Human) | (Human) | (Human) | (Human) | | LVDPYYYYRM |
| | | | ATGIPARFSGSGSGTDFTLTISSLQSED | | | | | | DV |
| | | | FALYYCQQYNNWWRTFGQGTKVEIN | | | | | | |
| | COV2- | 1541 | SYELTQPPSVSVSPGQTARITCSGDALP | IGHV3-33 | IGHJ4 | IGLV3-10 | IGU3 | 2550 | VRDLALFEVVI |
| | 2496 | | KKYAYWYQQKSGQAPVLVIYEDSKRP | (Human) | (Human) | (Human) | (Human) | | QQGV |
| | | | SGIPERFSGSSSGTMATLTISGAQVED | | | | | | |
| | | | EADYYCYSTDSSGNHWVFGGGTKLTV | | | | | | |
| | | | L | | | | | | |
| | COV2- | 1542 | SSELTQDPAVSVALGQTVRITCQGDSL | IGHV4-39 | IGHJ3 | IGLV3-19 | IGU2 | 2551 | ARHTVDCGG |
| | 2499 | | RSYYASWYQQKPGQAPLLVIYGKNNR | (Human) | (Human) | (Human) | (Human) | | DCFPNDAFDI |
| | | | PSGIPDRFSGSSSGNTPSLTITGAQAED | | | | | | |
| | | | EADYYCNFRDSSGHHPVFGEGTKLTVL | | | | | | |
| | COV2- | 1543 | QSVLTQPPSASGTPGQRVIISCSGSSSN | IGHV1-2 | IGHJ4 | IGLV1-44 | IGU2 | 2552 | ARVVVLGYGR |
| | 2504 | | IGSNTVKWYHQLPGTAPKLLICSNNQR | (Human) | (Human) | (Human) | (Human) | | PNNYYDGRN |
| | | | PSGVPDRFSGSKSDTSASLAISGLQSED | | | | | | VWDY |
| | | | EADYYCAAWDDSLNALVFGGGTKLTV | | | | | | |
| | | | L | | | | | | |
| | COV2- | 1544 | EIVMTQSPATLSVSPGERATLSCRASQ | IGHV3- | IGHJ4 | IGKV3-15 | IGKJ1 | 2553 | ARPRGGSYQT |
| | 2509 | | SVSSNLAWYQQKPGQAPRLLIYGAST | 303 | (Human) | (Human) | (Human) | | CFDY |
| | | | RATGIPARFSGSGSGTEFTLTISSLQSE | (Human) | | | | | |
| | | | DFAVYYCQQYNNWPGTFGQGTKVEI | | | | | | |
| | | | K | | | | | | |
| | COV2- | 1545 | SYELTQPSSVSVSPGQTARITCSGDVLA | IGHV7-4- | IGHJ4 | IGLV3-27 | IGU2 | 2554 | ARWGPDYGD |
| | 2510 | | KNYARWFQQKPGQAPVLVIYKDSERP | 1 | (Human) | (Human) | (Human) | | YASNDY |
| | | | SGIPKRFSGSSSGTTVTLTISGAQVEDE | (Human) | | | | | |
| | | | ADYYCYSAADNNRVFGGGTKLTVL | | | | | | |
| | COV2- | 1546 | SSELTQDPAVSVALGQTVRITCQGDSL | IGHV3-20 | IGHJ3 | IGLV3-19 | IGU2 | 2555 | AVIMSPIPRYS |
| | 2514 | | RSYYASWYQQKPGQVPILVIYDKNNR | (Human) | (Human) | (Human) | (Human) | | GYDWAGDAF |
| | | | PSGIPDRFSGSSSGNTASLTITGAQAED | | | | | | DI |
| | | | EADYYCNSRDSSGNAVVFGGGTKLTV | | | | | | |
| | | | L | | | | | | |
| | COV2- | 1547 | DIQMTQSPSSLSASVGDRVTITCQASQ | IGHV7-4- | IGHJ5 | IGKV1-33 | IGKJ3 | 2556 | ARGLVGRIDP |
| | 2515 | | DISNSLSWYQQKPGKAPKLLIYDASNL | 1 | (Human) | (Human) | (Human) | | |
| | | | KTGVPSRFSGSGSGTDFTFTISSLQPED | (Human) | | | | | |
| | | | IATYYCQQYDNLLLFTFGPGTKVDIK | | | | | | |
| | COV2- | 1548 | EIVLTQSPATLSLSPGERATLSCRASQS | IGHV1-46 | IGHJ3 | IGKV3-11 | IGKJ1 | 2557 | ARDQQIVPH |
| | 2516 | | VSSYLAWYQQKPGQAPRLLIYDASNR | (Human) | (Human) | (Human) | (Human) | | ADGFDI |
| | | | ATGIPARFSGSGSGTDFTLTISSLEPED | | | | | | |
| | | | FAVYYCQQRSNWPPRTWTFGQGTKVE | | | | | | |
| | | | IK | | | | | | |
| | COV2- | 1549 | EIVLTQSPATLSLSPGERATLSCRASQS | IGHV1-69 | IGHJ1 | IGKV3-11 | IGKJ4 | 2558 | ARIGSYPEYFQ |
| | 2517 | | VSSFLAWYQQKPGQAPRLLIYDASNR | (Human) | (Human) | (Human) | (Human) | | |
| | | | ATGIPARFSGSGSGTDFTLTISSLEPED | | | | | | |
| | | | FAVYYCHYRSNWPPVLTFGGGTKVEIE | | | | | | |
| | COV2- | 1550 | SSELTQDPAVSVALGQTVRITCQGDSL | IGHV3-9 | IGHJ6 | IGLV3-19 | IGU2 | 2559 | AKDIIRQGED |
| | 2518 | | RSYYASWYQQKPGQVPILVIYDKNNR | (Human) | (Human) | (Human) | (Human) | | GMDV |
| | | | PSGIPDRFSGSSSGNTASLTITGAQAED | | | | | | |
| | | | EADYYCNSRDSSGNAVVFGGGTKLTV | | | | | | |
| | COV2- | 1551 | SSELTQDPAVSVALGQTVRITCQGDSL | IGHV3-7 | IGHJ6 | IGLV3-19 | IGU3 | 2560 | ARDVGGYSG |
| | 2520 | | RSYYANWYQQKPGQAPVVVIFGKNN | (Human) | (Human) | (Human) | (Human) | | YDLGFDYYYY |
| | | | RPSGIPDRFSGSNSGNTASLTITGAQA | | | | | | MDV |
| | | | EDEADYYCNSRDSSGYIWGWMFGGG | | | | | | |
| | | | TKLTVL | | | | | | |
| | COV2- | 1552 | SYVLTQPPSVSVAPGKTARITCGGNNI | IGHV3-30 | IGHJ3 | IGLV3-21 | IGU3 | 2561 | AKDRTAVFLF |
| | 2521 | | GSKSVHWYQQKPGQAPVVVVYDDSD | (Human) | (Human) | (Human) | (Human) | | FGLGDAFDI |
| | | | RPSGLPERFSGSNSGNTATLTISRVEA | | | | | | |
| | | | GDEADYYCQVWDSSSDHWVFGGGT | | | | | | |
| | | | KLTVL | | | | | | |
| | COV2- | 1553 | QSVLTQPPSVSGAPGQRVTISCTGSSS | IGHV5-51 | IGHJ4 | IGLV1-40 | IGU3 | 2562 | ASALRERGVQ |
| | 2524 | | NIGAGYDVHWYQQLPGTAPKLLIFINS | (Human) | (Human) | (Human) | (Human) | | LWSV |
| | | | NRPSGVPDRFSGSKSGTSASLAITGLQ | | | | | | |
| | | | AEDEADYYCQSYDSSLGALFGGGTKLT | | | | | | |
| | | | VL | | | | | | |
| | COV2- | 1554 | QLVLTQSPSASASLGASVKLTCTLSSGH | IGHV3-23 | IGHJ4 | IGLV4-69 | IGU3 | 2563 | AKDPASGIVG |
| | 2525 | | TTYAIAWHQQQPEKGPRYLMKLNSD | (Human) | (Human) | (Human) | (Human) | | PTHFDY |
| | | | GSHTRGDGIPDRFSGSSSGAERYLTISS | | | | | | |
| | | | LQSEDEADYYCQSWDTGIGVFGGGTK | | | | | | |
| | | | LTVL | | | | | | |
| | COV2- | 1555 | SYELTQPPSVSVSPGQTASITCFGDKLG | IGHV1-24 | IGHJ4 | IGLV3-1 | IGU2 | 2564 | ATGFAVFGRA |
| | 2526 | | DKYACWFQQKPGQSPVLIIYQGAKRP | (Human) | (Human) | (Human) | (Human) | | AVPY |
| | | | SGIPERFSGSNSGNTATLTISGTQAMD | | | | | | |
| | | | EADYYCQAWDSSTVVFGGGTKLTVL | | | | | | |
| | COV2- | 1556 | QSALTQPASVSGSPGQSITISCTGTSSD | IGHV4-30 | IGHJ4 | IGLV2-23 | IGU2 | 2565 | ARFRRSYGSG |
| | 2527 | | VGSYNLVSWYQQHPGKAPKLMIYEVS | (Human) | (Human) | (Human) | (Human) | | SYYNISFDY |
| | | | KRPSGVSNRFSGSKSGNTASLTISGLQ | | | | | | |
| | | | AEDEADYYCCSYVGSSTYVVFGGGTKL | | | | | | |
| | | | TVL | | | | | | |
| | COV2- | 1557 | SYELTQPPSVSVSPGQTARITCSADALS | IGHV7-4- | IGHJ4 | IGLV3-25 | IGU3 | 2566 | VREYGSGHPL |
| | 2529 | | KQYAYWYQQKPGQAPVVVIYKDSERP | 1 | (Human) | (Human) | (Human) | | PI |
| | | | SGIPERFSGSSSGTTVTLTISGVQAEDE | (Human) | | | | | |
| | | | ADYYCQSADSSSHWVFGGGTKLTVL | | | | | | |
| | COV2- | 1558 | NFMLTQPHSVSESPGKTVTISCTGNSG | IGHV4-59 | IGHJ3 | IGLV6-57 | IGU2 | 2567 | ARATWLRDA |
| | 2531 | | SIASNYVQWYQQRPGSAPTTVIYEDS | (Human) | (Human) | (Human) | (Human) | | FGI |
| | | | QRPSGVPDRFSGSIDSSSNSASLTISGL | | | | | | |
| | | | KTEDEADYYCQSFDSGNVVFGGGTKL | | | | | | |
| | | | TVL | | | | | | |
| | COV2- | 1559 | QSVLTQPPSASGTPGQRVTISCSGSSS | IGHV1-46 | IGHJ5 | IGLV1-44 | IGU2 | 2568 | ARGFHVPAAL |
| | 2532 | | NIGSNTVNWYQQLPGTAPKLLIYNNN | (Human) | (Human) | (Human) | (Human) | | RNWFDP |
| | | | QRPSGVPDRLSGSKSGTSASLAISGLQ | | | | | | |
| | | | SEDEADYYCVAWDDSRNGLVFGGGT | | | | | | |
| | | | KLTVL | | | | | | |
| | COV2- | 1560 | DIVMTQSPDSLAVSLGERATINCKSSQ | IGHV4-31 | IGHJ4 | IGKV4-1 | IGKJ2 | 2569 | AREANDSGSF |
| | 2533 | | SVLYSSNNKNYLAWYQQKPGQPPKLLI | (Human) | (Human) | (Human) | (Human) | | YNGPFDY |
| | | | YWASTRESGVPDRFSGSGSGTDFTLTI | | | | | | |
| | | | SSLQAEDVAVYYCQQYYSTRTFGQGT | | | | | | |
| | | | KLEIK | | | | | | |
| | COV2- | 1561 | DIVMTQSPDSLAVSLGERATINCKSSQ | IGHV4-61 | IGHJ6 | IGKV4-1 | IGKJ2 | 2570 | ARGGLLWFG |
| | 2536 | | SVLYSSNNKNYLAWYQQKPGQPPKLLI | (Human) | (Human) | (Human) | (Human) | | GAGNYMDV |
| | | | YWASTRESGVPDRFSGSGSGTDFTLTI | | | | | | |
| | | | SSLQAEDVAVYYCQQYYSTPPYTFGQG | | | | | | |
| | | | TKVEIK | | | | | | |
| | COV2- | 1562 | QSVLTQPPSASGTPGQRVTISCSGSNS | IGHV1-8 | IGHJ4 | IGLV1-44 | IGU3 | 2571 | ARMRTGWPT |
| | 2539 | | NIGSYTVNWYQQFPGTAPKLLIYDNN | (Human) | (Human) | (Human) | (Human) | | HGRPDDF |
| | | | QRTSGVPDRFSGSKSGTSASLAISGLQ | | | | | | |
| | | | SEDEASYYCLAWDDSLNGLVFGGGTK | | | | | | |
| | | | LTVL | | | | | | |
| | COV2- | 1563 | QSVLTQPPSASGTPGQRVTISCSGSSS | IGHV4-34 | IGHJ5 | IGLV1-47 | IGU3 | 2572 | ARGPPVTTFF |
| | 2545 | | NIGSNYVYWYQQLPGTAPKLLIYSSNQ | (Human) | (Human) | (Human) | (Human) | | VFSLLFDP |
| | | | RPSGVPDRFSGSKSGTSASLAISGLRSE | | | | | | |
| | | | DEADYYCAAWDASLSGWVFGGGTKL | | | | | | |
| | | | TVL | | | | | | |
| | COV2- | 1564 | SYELTQPPSVSVSPGQTARITCSADALP | IGHV3-30 | IGHJ3 | IGLV3-25 | IGU3 | 2573 | AKEGEWELR |
| | 2546 | | KHYAYWYQQRPGQAPVLVIYKDIERP | (Human) | (Human) | (Human) | (Human) | | GNALDI |
| | | | SGIPERFSGSSSGTTVTLTITGAQAEDE | | | | | | |
| | | | ADYYCQSVDGSGSSVVFGGGTKLAVL | | | | | | |
| | COV2- | 1565 | SYELTQPPSVSVSPGQTASITCSGDKLG | IGHV3-33 | IGHJ3 | IGLV3-1 | IGU2 | 2574 | AREGQWPN |
| | 2549 | | DKYACWYQQKPGQSPVLVIHQDSQR | (Human) | (Human) | (Human) | (Human) | | QAFDI |
| | | | PSGIPERFSGSNSGNTATLTISGTQAM | | | | | | |
| | | | DEADYYCQAWDSSTHVVFGGGTKLT | | | | | | |
| | | | VL | | | | | | |
| | COV2- | 1566 | QSALTQPASVSGSPGQSITISCTGTSSD | IGHV4-39 | IGHJ4 | IGLV2-14 | IGU1 | 2575 | ASGPPYMATF |
| | 2551 | | VGGYNYVSWFQHHPDKAPRLMIYDV | (Human) | (Human) | (Human) | (Human) | | SYYFDY |
| | | | SKRPSGVSNRFSGSKSGNTASLTISGLQ | | | | | | |
| | | | AEDEADYYCSSYTSSSTPFVFGTGTKVT | | | | | | |
| | | | VL | | | | | | |
| | COV2- | 1567 | QPVLTQSSSASASLGSSVKLTCTLSSGH | IGHV3-11 | IGHJ4 | IGLV4-60 | IGU3 | 2576 | ARDPIRDGV |
| | 2552 | | SSYIIAWHQQQPGKAPRYLMKLEGSG | (Human) | (Human) | (Human) | (Human) | | WGLNENDY |
| | | | SYNKGSGVPDRFSGSSSGADCYLTISN | | | | | | |
| | | | LQSEDEADYYCETWDSNTRVFAGGTK | | | | | | |
| | | | LTVL | | | | | | |
| | COV2- | 1568 | DIQMTQSPSSLSASVGDRVTITCRASQ | IGHV3-30 | IGHJ4 | IGKV1-39 | IGKJ2 | 2577 | ARSPPASYYN |
| | 2553 | | SISSYLNWYQQKPGKAPKLLIYAASSLQ | (Human) | (Human) | (Human) | (Human) | | PSTGYFDY |
| | | | SGVPSRFSGSGSGTDFTLTISSLQPEDF | | | | | | |
| | | | ATFYCQQSYSTPMHTFGQGTKLEIK | | | | | | |
| | COV2- | 1569 | DIQLTQSPSFLSASVGDRVTITCRASQG | IGHV1-46 | IGHJ4 | IGKV1-9 | IGKJ1 | 2578 | ARDVFWVPA |
| | 2554 | | ISSYLAWYQQKPGKAPKLLIYAASTLQS | (Human) | (Human) | (Human) | (Human) | | ASSFDY |
| | | | GVPSRFSGSGSGTEFTLTISSLQPEDFA | | | | | | |
| | | | TYYCQQLNSYLGTFGQGTKVEIK | | | | | | |
| | COV2- | 1570 | DIQMTQSPSSVSASVGDRVTITCRASQ | IGHV3- | IGHJ4 | IGKV1-12 | IGKJ3 | 2579 | ARDQEWFRE |
| | 2558 | | GISSWLAWYQQKPGKAPKLLIYDASSL | 303 | (Human) | (Human) | (Human) | | LFLFDY |
| | | | QSGVPSRFSGSGSGTDFTLTISSLQPED | (Human) | | | | | |
| | | | FATYYCQQANSFPPTFGPGTKVDIK | | | | | | |
| | COV2- | 1571 | QSVLTQPPSASGTPGQRVTISCSGSNS | IGHV1-8 | IGHJ4 | IGLV1-44 | IGU2 | 2580 | ARMRTGWPT |
| | 2562 | | NIGSYTVNWYQQFPGTAPKLLIYDNN | (Human) | (Human) | (Human) | (Human) | | HGRPDDF |
| | | | QRTSGVPDRFSGSKSGTSASLAISGLQ | | | | | | |
| | | | SEDEANYYCLVWDDSLNGLVFGGGTK | | | | | | |
| | | | LTVL | | | | | | |
| | COV2- | 1572 | QSALTQPASVSGSPGQSITISCTGTSSD | IGHV4-34 | IGHJ4 | IGLV2-23 | IGU1 | 2581 | ARGWGWGA |
| | 2563 | | VGSYNLVSWYQQHPGKAPKLMIYEVS | (Human) | (Human) | (Human) | (Human) | | VAGRAEYYFD |
| | | | KRPSGVSNRFSGSKSGNTASLTISGLQ | | | | | | Y |
| | | | AEDEADYYCCSYAGSSTWGFGTGTKV | | | | | | |
| | | | TVL | | | | | | |
| | COV2- | 1573 | SYVLTQPPSVSVAPGKTARITCGGNNI | IGHV3- | IGHJ6 | IGLV3-21 | IGU2 | 2582 | ARAQGGNYY |
| | 2564 | | GTKGVHWYQQKPGQAPVLVVYDDS | 303 | (Human) | (Human) | (Human) | | YGMDV |
| | | | DRPSGIPGRFSGSNSGNTATLTISRVEA | (Human) | | | | | |
| | | | GDEADYFCQVWDSSSDHHVVFGGGT | | | | | | |
| | | | KLTVL | | | | | | |
| | COV2- | 1574 | DIVMTQSPLSLPVTPGEPASISCRSSQS | IGHV4-61 | IGHJ4 | IGKV2-28 | IGKJ4 | 2583 | ARGAASFDY |
| | 2565 | | LLHSDGYTYLDWYLQKPGQSPQLLIYL | (Human) | (Human) | (Human) | (Human) | | |
| | | | GSKRASGVPDRFSGSGSGTDFTLKISR | | | | | | |
| | | | VEAEDVGVYYCMQALQTPLTFGGGTK | | | | | | |
| | | | VEIK | | | | | | |
| | COV2- | 1575 | EIVMTQSPGTLSVSPGERATLSCRASQ | IGHV4-39 | IGHJ5 | IGKV3-15 | IGKJ2 | 2584 | ARDPRVVVTA |
| | 2570 | | SVSSNLAWYQQKPGQAPRLLIYGAST | (Human) | (Human) | (Human) | (Human) | | RMYNWFDP |
| | | | RATGVPARFSGSGSGTEFTLTISSLQSE | | | | | | |
| | | | DFAVYYCQQYNNWPPMYTFGQGTKL | | | | | | |
| | | | EIK | | | | | | |
| | COV2- | 1576 | EIVMTQSPATLSVSPGERATLSCRASQ | IGHV4-59 | IGHJ5 | IGKV3-15 | IGKJ1 | 2585 | ARDQRQFQL |
| | 2571 | | SVSSNLAWYQQKPGQAPRLLIYGAST | (Human) | (Human) | (Human) | (Human) | | LGRFGWFDP |
| | | | RATGIPARFSGSGSGTEFTLTISSLQSE | | | | | | |
| | | | DFAVYYCQQYNNWPRTFGQGTKVEIK | | | | | | |
| | COV2- | 1577 | QPVVTQSPSASASLGASVKLTCTLDSG | IGHV4-39 | IGHJ2 | IGLV4-69 | IGU2 | 2586 | ARQWKWFG |
| | 2574 | | HRSYAIAWHQQRPEKGPRFLMRITTD | (Human) | (Human) | (Human) | (Human) | | EAWYFDL |
| | | | GRHTKGDGIPDRFSGSGSGTERYLTISS | | | | | | |
| | | | LQSEDEADYYCQTWGTFGGGTRLTVL | | | | | | |
| | COV2- | 1578 | DIVMTQTPLSLSVTPGQPASISCKSSQS | IGHV7-4- | IGHJ6 | IGKV2D-29 | IGKJ4 | 2587 | ARDQDSGYP |
| | 2582 | | LLHSDGKTYLYWYLQKPGQSPQLLIYE | 1 | (Human) | (Human) | (Human) | | TYYYYYMDV |
| | | | VSNRFSGVPDRFSGSGSGTDFTLKISR | (Human) | | | | | |
| | | | VEAEDVGVYYCMQSIQPPLTFGGGTK | | | | | | |
| | | | VEIK | | | | | | |
| | COV2- | 1579 | DIVMTQSPDSLAVSLGERATINCKSSQ | IGHV1-8 | IGHJ6 | IGKV4-1 | IGKJ4 | 2588 | ARGGIYYLVR |
| | 2583 | | SVLYSSNNKNYLAWYQQKPGQPPKLLI | (Human) | (Human) | (Human) | (Human) | | GFIIGYYGMD |
| | | | YWASTRESGVPDRFSGSGSGTDFTLTI | | | | | | V |
| | | | SSLQAEDVAVYYCQQYYSTPLTFGGGT | | | | | | |
| | | | KVEIK | | | | | | |
| | COV2- | 1580 | QSALTQPASVSGSPGQLITIFCNGSISD | IGHV3-15 | IGHJ4 | IGLV2-14 | IGU2 | 2589 | TTGGYSSYAA |
| | 2584 | | VGGWNYVSWYQQHPDKAPKMMIY | (Human) | (Human) | (Human) | (Human) | | SDY |
| | | | DVRHRPSGVSSRFSGSKSGNTASLTIS | | | | | | |
| | | | GLQAEDEGDYYCSSFTSRGALVLFGG | | | | | | |
| | | | GTKLTVL | | | | | | |
| | COV2- | 1581 | QSALTQPRSVSGSPGQSVTISCTGTSS | IGHV3-48 | IGHJ2 | IGLV2-11 | IGU2 | 2590 | ARVDYYGSGS |
| | 2585 | | DVGGYNYVSWYQQHPGKAPKLMIYD | (Human) | (Human) | (Human) | (Human) | | VYWYFDL |
| | | | VSKRPSGVPDRFSGSKSGNTASLTISGL | | | | | | |
| | | | QAEDEADYYCCSYAGIWVFGGGTKLT | | | | | | |
| | | | VL | | | | | | |
| | COV2- | 1582 | EIVLTQSPGTLSLSPGERATLSCRASQS | IGHV3-9 | IGHJ3 | IGKV3-20 | IGKJ2 | 2591 | AKVGWELSID |
| | 2586 | | VSSSYLGWYHQKPGQAPRLLIYGASSR | (Human) | (Human) | (Human) | (Human) | | AFDL |
| | | | ATGIPDRFSGSGSGTDFTLTISRLEPED | | | | | | |
| | | | FAVYYCQHYGSSRSTFGQGTKLEIK | | | | | | |
| | COV2- | 1583 | DIQMTQSPSSLSASVGDRVTITCRARQ | IGHV2-5 | IGHJ3 | IGKV1-39 | IGKJ4 | 2592 | AHRLWFRDA |
| | 2587 | | SISNYLNWYQQKPGKAPKLLIYAASSL | (Human) | (Human) | (Human) | (Human) | | FDI |
| | | | HSGVPSRFSGSGSGTDFTLTISSLQPED | | | | | | |
| | | | FATYYCQQSYSTPTFGGGTKVEIK | | | | | | |
| | COV2- | 1584 | DIQMTQSPSSLSASVGDRVTITCRASQ | IGHV2-70 | IGHJ6 | IGKV1-39 | IGKJ2 | 2593 | ARIQYQLNG |
| | 2589 | | SISSYLNWYQQKPGKAPKLLIYAASSLH | (Human) | (Human) | (Human) | (Human) | | MDV |
| | | | SGVPSRFSGSGSGTDFTLTISSLQPEDF | | | | | | |
| | | | ATYYCQQSYSTPYTFGQGTKLEIK | | | | | | |
| | COV2- | 1585 | SSELTQDPAVSVALGQTVRITCQGDSL | IGHV1-8 | IGHJ6 | IGLV3-19 | IGU2 | 2594 | ARGRVGYVG |
| | 2590 | | RSYYASWYQQKPRQAPVLIISGNNNR | (Human) | (Human) | (Human) | (Human) | | SGSRGYYYYY |
| | | | PSGIPDRFSGSSSGNTASLTITGAQAED | | | | | | DMDV |
| | | | EADYYCNSRDSSGNHLRVFGGGTKLT | | | | | | |
| | | | VL | | | | | | |
| | COV2- | 1586 | EIVLTQSPGTLSLSPGERATLSCRASQS | IGHV5-51 | IGHJ2 | IGKV3-20 | IGKJ5 | 2595 | ARPDYSSGW |
| | 2602 | | VSSNFLAWYQQKPGQAPRLLIYGASS | (Human) | (Human) | (Human) | (Human) | | FSYWYFDL |
| | | | RATGIPDRFSGSGSGTDFTLTISRLEPE | | | | | | |
| | | | DFAVYYCQQYGRSPITFGQGTRLEIK | | | | | | |
| | COV2- | 1587 | DIQMTQSPSSLSASVGDRVTITCQASQ | IGHV7-4- | IGHJ4 | IGKV1-33 | IGKJ3 | 2596 | ARGRSYGLSL |
| | 2610 | | DISNYLNWYQQKPGKAPKLLIYAASNL | 1 | (Human) | (Human) | (Human) | | GY |
| | | | ETGVPSRFSGSGSGTDFTFTISSLQPED | (Human) | | | | | |
| | | | IATYYCQQYDNLLQFTFGPGTKVDIK | | | | | | |
| | COV2- | 1588 | SYELTQPPSVSVSPGQTARITCSGDALP | IGHV3-33 | IGHJ4 | IGLV3-10 | IGU1 | 2597 | ARESADISSRL |
| | 2611 | | TKYAYWYQQKSGQAPVLVIYDDSKRP | (Human) | (Human) | (Human) | (Human) | | DY |
| | | | SGIPERFSGSSSGTMATLTISGAQVED | | | | | | |
| | | | EADYYCYSTDSSGNVFGTGTKVTVL | | | | | | |
| | COV2- | 1589 | EIVMTQSPATLSVSAGERATLSCRASQ | IGHV2-5 | IGHJ3 | IGKV3-15 | IGKJ4 | 2598 | AHRLWFRDA |
| | 2614 | | SISSNLAWYHQKPGQAPRLLIYGASTR | (Human) | (Human) | (Human) | (Human) | | FDI |
| | | | ATGIPARFSGSGSGTEFTLTISSLQSED | | | | | | |
| | | | FAVYYCQQYNSYSLTFGGGTKVEIK | | | | | | |
| | COV2- | 1590 | EIVLTQSPGTLSLSPGERATLSCRASQS | IGHV3-72 | IGHJ4 | IGKV3-20 | IGKJ3 | 2599 | ASVITFGGVIV |
| | 2616 | | VSSSYLAWYQQKPGQAPRLLIYGASSR | (Human) | (Human) | (Human) | (Human) | | RSY |
| | | | ATGIPDRFSGSGSGTDFTLTISRLEPED | | | | | | |
| | | | FAVYYCQYYGSSPFGFGPGTKVDIK | | | | | | |
| | COV2- | 1591 | EIVLTQSPATLSLSPGERATLSCRASQS | IGHV1-69 | IGHJ4 | IGKV3-11 | IGKJ4 | 2600 | ARVSGYGDY |
| | 2617 | | VSRFLAWYQQKPGQAPRLLIYDASNR | (Human) | (Human) | (Human) | (Human) | | GAYSDY |
| | | | ATGIPARFSGSGSGTDFTLTISSLEPED | | | | | | |
| | | | FAVYYCQQRSNWPPRLTFGGGTKVEIK | | | | | | |
| | COV2- | 1592 | QSVLTQPPSASGTPGQRVTISCSGSSS | IGHV3-20 | IGHJ4 | IGLV1-44 | IGU2 | 2601 | ASVITFGGVIV |
| | 2618 | | NIGSNTVNWYQQLPGTAPKLLIYSNN | (Human) | (Human) | (Human) | (Human) | | RSY |
| | | | QRPSGVPDRFSGSKSGTSASLAISGLQ | | | | | | |
| | | | SEDENNYYCAVWDDSLNGVVFGGGT | | | | | | |
| | | | KLTVL | | | | | | |
| | COV2- | 1593 | QSVLTQPPSASGTPGQRVTISCSGSSS | IGHV3-23 | IGHJ6 | IGLV1-47 | IGU2 | 2602 | ARVEGDWLL |
| | 2619 | | NIGSNYVYWYQQLPGTAPKLLISRNN | (Human) | (Human) | (Human) | (Human) | | GGPYYHYYG |
| | | | QRPSGVPDRFSGSKSGTSASLAISGLQ | | | | | | MDV |
| | | | SEDEANYYCLVWDDSLNGLVFGGGTK | | | | | | |
| | | | LTVL | | | | | | |
| | COV2- | 1594 | QSALTQPASVSGSPGQSITISCTGTSSD | IGHV3- | IGHJ4 | IGLV2-14 | IGU2 | 2603 | ARADTMVRG |
| | 2620 | | VGGYNYVSWYQQHPGKAPKLMIYDV | 303 | (Human) | (Human) | (Human) | | TYFEY |
| | | | SNRPSGVSNRFSGSKSGNTASLTISGL | (Human) | | | | | |
| | | | QAEDEADYCCSSYTSSRAVLFGGGTKL | | | | | | |
| | | | TVL | | | | | | |
| | COV2- | 1595 | DFVMTQSPGSLAVSLGERATINCRSSQ | IGHV3-33 | IGHJ4 | IGKV4-1 | IGKJ1 | 2604 | ARDYCNGVT |
| | 2621 | | SVLDNSSNKNHLAWHQQKPGQPPKL | (Human) | (Human) | (Human) | (Human) | | CNSNY |
| | | | LIYWASTRESGVPDRFSGSGSGTDFTL | | | | | | |
| | | | TISSLQAEDVAVYYCQQYYSSHWTFG | | | | | | |
| | | | QGTKVEIK | | | | | | |
| | COV2- | 1596 | QSALTQPASVSGSPGQSITISCTGTSSD | IGHV4-4 | IGHJ4 | IGLV2-23 | IGU3 | 2605 | ARGWYFDY |
| | 2622 | | VGSYNLVSWYQQHPGKAPKLMIYEVS | (Human) | (Human) | (Human) | (Human) | | |
| | | | KRPSGVSNRFSGSKSGNTASLTISGLQ | | | | | | |
| | | | AEDEADYYCYSYAGSSTWVFGGGTKL | | | | | | |
| | | | TVL | | | | | | |
| | COV2- | 1597 | SYELTQPPSVSVSPGQTARITCSADALP | IGHV1-69 | IGHJ6 | IGLV3-25 | IGU2 | 2606 | ARVEGEGVD |
| | 2624 | | KQYAYWYQQKPGQAPVLVIYKDSERP | (Human) | (Human) | (Human) | (Human) | | SYYYGMDV |
| | | | SGIPERFSGSSSGTTVTLTISGVQAEDE | | | | | | |
| | | | ADYYCQSTDSSGSYVVFGGGTKLTVL | | | | | | |
| | COV2- | 1598 | DIQMTQSPSSLSASVGDRVTITCRASQ | IGHV3-9 | IGHJ6 | IGKV1-39 | IGKJ2 | 2607 | AKDIIRQGED |
| | 2628 | | NIASYLNWYQQKPGKAPKLLIYAASSL | (Human) | (Human) | (Human) | (Human) | | GMDV |
| | | | QSGVPSRFSGSGSGTDFTLTISSLQPEE | | | | | | |
| | | | FATYYCHQSYFTPQTFGQGTKLEIK | | | | | | |
| | COV2- | 1599 | EIVLTQSPATLALSVGERATLSCVASQR | IGHV4-39 | IGHJ5 | IGKV3D-20 | IGKJ3 | 2608 | ARHPVDGYN |
| | 2631 | | VSSDYIAWYQKKPGLAPRLLVYHGSA | (Human) | (Human) | (Human) | (Human) | | YGYSDL |
| | | | WATGSSARFSGSGSGTAFTLTISSLEPE | | | | | | |
| | | | DFAVYYCQQYGNSPFTFGPGTKVEFK | | | | | | |
| | COV2- | 1600 | EIVLTQSPGTLSLSPGERATLSCRASQS | IGHV1-2 | IGHJ4 | IGKV3-20 | IGKJ2 | 2609 | ARVVVLGYGR |
| | 2632 | | VSSSYLAWYQEKPGQAPRLLMYSASS | (Human) | (Human) | (Human) | (Human) | | PNNYYDGRN |
| | | | RATGIPDRFSGSGSATDFTLTINRLEPE | | | | | | VWDY |
| | | | DFAVYYCQQYVEPPFTFGQGTKLEIK | | | | | | |
| | COV2- | 1601 | QSALTQPRSVSGSPGQSVTISCTGTSS | IGHV3-30 | IGHJ4 | IGLV2-11 | IGU2 | 2610 | ARAGGGSYR |
| | 2639 | | DVGGYNYVSWYQQHPGKAPKLMIYD | (Human) | (Human) | (Human) | (Human) | | GPFDY |
| | | | VSKRPSGVPDRFSGSKSGNTASLTVSG | | | | | | |
| | | | LQAEDEAEYYCSAYAGSNNLVFGGGT | | | | | | |
| | | | KLTVL | | | | | | |
| | COV2- | 1602 | EIVLTQSPGTLSLSPGERATLSCRAGQT | IGHV3-30 | IGHJ3 | IGKV3-20 | IGKJ2 | 2611 | AKSYNGNYYD |
| | 2641 | | VSSSYLAWYQHKPGQAPRLLIYGASSR | (Human) | (Human) | (Human) | (Human) | | AFDI |
| | | | ATGIPDRFSGSGSGTDFTLTISRLEPED | | | | | | |
| | | | FAVYYCQQYGSSYTFGQGTKLEIK | | | | | | |
| | COV2- | 1603 | DIQMTQSPSSLSASVGDRVTITCRASQ | IGHV3-30 | IGHJ6 | IGKV1-39 | IGKJ5 | 2612 | ARGSAGNYYY |
| | 2643 | | SISSYLNWYQQKPGKAPKLLIYAASSLQ | (Human) | (Human) | (Human) | (Human) | | GMDV |
| | | | SGVPSRFSGSGSGTDFTLTISSLQPEDY | | | | | | |
| | | | ATYYCQQSYSTPGTFGQGTRLEIK | | | | | | |
| | COV2- | 1604 | EIVLTQSPGTLSLSPGERATLSCRASQS | IGHV5-51 | IGHJ6 | IGKV3-20 | IGKJ1 | 2613 | ARLTFGGSGS |
| | 2656 | | VSSSYLAWYQQKPGQAPRLLIYGASSR | (Human) | (Human) | (Human) | (Human) | | YYFYYNGMD |
| | | | ATGIPDRFSGSGSGTDFTLTISRLEPED | | | | | | V |
| | | | FAVYYCQQYGRSSGTFGQGTKVEIK | | | | | | |
| | COV2- | 1605 | EIVLTQSPGTLSLSPGERATLSCRASQS | IGHV3-13 | IGHJ6 | IGKV3-20 | IGKJ5 | 2614 | ARADPYQLLG |
| | 2660 | | VSSSYLAWYQQKPGQAPRLLIYGASSR | (Human) | (Human) | (Human) | (Human) | | QHYYYGMDV |
| | | | ATGIPDRFSGSGSGTDFTLTISRLEPED | | | | | | |
| | | | FAVYYCQQYGSSPLITFGQGTRLEIK | | | | | | |
| | COV2- | 1606 | DIVMTQSPDFLAVSLGERATISCKSSQS | IGHV3-30 | IGHJ4 | IGKV4-1 | IGKJ4 | 2615 | AKGGDGSG |
| | 2669 | | VLYTPKNKNYLAWYKQKPGQPPKVLIY | (Human) | (Human) | (Human) | (Human) | | WAWDGDNP |
| | | | WASTRESGVPDRFSGSGSGTDFTLIISS | | | | | | PTDY |
| | | | LQAEDAAVYYCQQYYTAPLTFGGGTR | | | | | | |
| | | | VEIK | | | | | | |
| | COV2- | 1607 | QTVVTQEPSLTVSPGGTVTLTCASSAG | IGHV2-26 | IGHJ5 | IGLV7-43 | IGU3 | 2616 | ARIVLGASGT |
| | 2673 | | AVTSGYYPNWFQQKPGQAPRALIYST | (Human) | (Human) | (Human) | (Human) | | YPSPGFDP |
| | | | ANKHSWTPARFSGSLLGGKAALTLSG | | | | | | |
| | | | VQPEDEAEYYCLLYYGGAWVFGGGTK | | | | | | |
| | | | LTVL | | | | | | |
| | COV2- | 1608 | EIVLTQSPDFQSVTPKEKVTITCRASQN | IGHV3-30 | IGHJ5 | IGKV6-21 | IGKJ4 | 2617 | AKDGSGSYYG |
| | 2675 | | IGSSLHWYQQKPDQSPKVIIKYASQSF | (Human) | (Human) | (Human) | (Human) | | WFDP |
| | | | SGVPSRFSGSGSGTDFTLTINSLEAEDA | | | | | | |
| | | | ATYYCHQSSSLPPTFGGGTKVEIK | | | | | | |
| | COV2- | 1609 | EIVLTQSPATLSLSPGERATLSCRASQS | IGHV1-69 | IGHJ4 | IGKV3-11 | IGKJ3 | 2618 | ARSCGDCYSA |
| | 2676 | | ISSFLAWYQQKPGQAPRLLIYDASNRA | (Human) | (Human) | (Human) | (Human) | | DLDF |
| | | | TGIPARFSGSGSGTDFTLTISSLEPEDF | | | | | | |
| | | | AVYYCQRRSNWPPFTFGPGTKVDIK | | | | | | |
| | COV2- | 1610 | NFMLTQPHSVSESPGKTVTISCTGSSG | IGHV4-39 | IGHJ4 | IGLV6-57 | IGU3 | 2619 | ARLLWLRGHF |
| | 2677 | | SIASNYVQWYQQRPGSAPTTVIYEDN | (Human) | (Human) | (Human) | (Human) | | DY |
| | | | QRPSGVPDRFSGSIDSSSNSASLTISGL | | | | | | |
| | | | KTEDEADYYCQSYDSSNYWVFGGGTK | | | | | | |
| | | | LTVL | | | | | | |
| | COV2- | 1611 | SSELTQDPAVSVALGQTVRITCQGDSL | IGHV3-20 | IGHJ3 | IGLV3-19 | IGU3 | 2620 | AVIMSPIPRYS |
| | 2678 | | RSYYASWYQQKPGQVPILVIYDKNNR | (Human) | (Human) | (Human) | (Human) | | GYDWAGGAF |
| | | | PSGIPDRFSGSSSGNTASLTITGAQAED | | | | | | DI |
| | | | EADYYCNSRDSSGNAVVFGGGTKLTV | | | | | | |
| | | | L | | | | | | |
| | COV2- | 1612 | DIVMTQSPDSLAVSLGERATINCKSSQ | IGHV3-30 | IGHJ5 | IGKV4-1 | IGKJ2 | 2621 | ARALNKGFDP |
| | 2681 | | SVLYSSNNKNYLAWYQQKPGQPPKLLI | (Human) | (Human) | (Human) | (Human) | | |
| | | | YWASTRESGVPDRFSGSGSGTDFTLTI | | | | | | |
| | | | SSLQAEDVAVYYCQQYYSSPYTFGQGT | | | | | | |
| | | | KLEIK | | | | | | |
| | COV2- | 1613 | EIVLTQSPGTLSLSPGERATLSCRASQS | IGHV1-58 | IGHJ3 | IGKV3-20 | IGKJ1 | 2622 | AAPHCNRTSC |
| | 2684 | | VSSSYLGWYQQKPGQAPRLLIYGASSR | (Human) | (Human) | (Human) | (Human) | | YDAFDL |
| | | | ATGIPDRFSGSGSGTDFTLTISRLESED | | | | | | |
| | | | FALYYCQQYNNWWRTFGQGTKVEIK | | | | | | |
| | COV2- | 1614 | EIVLTQSPGTLSLSPGERATLSCRASQS | IGHV1-46 | IGHJ6 | IGKV3-20 | IGKJ4 | 2623 | ARDRLGDGSY |
| | 2685 | | VSSSYLAWYQQKRGQAPRLLIYGASSR | (Human) | (Human) | (Human) | (Human) | | LGGGYYGMD |
| | | | ATGIPDRFSGSGSGTDFTLTISRLEPED | | | | | | V |
| | | | FAVYYCQQYGSSPRLTFGGGTKVEIK | | | | | | |
| | COV2- | 1615 | QSVLTQPPSASGTPGQRVTISCSGSNS | IGHV1-8 | IGHJ5 | IGLV1-44 | IGU2 | 2624 | ARMRSGWPT |
| | 2693 | | NIGSYTVNWYQQLPGTAPKLLIYDNN | (Human) | (Human) | (Human) | (Human) | | HGRPDDL |
| | | | QRTSGVPDRLSGSKSGTSASLAISGLQS | | | | | | |
| | | | EDEANYYCAVWDDSLNGLVFGGGTK | | | | | | |
| | | | LTVL | | | | | | |
| | COV2- | 1616 | QSVLTQPPSVSGAPGQRVTISCTGSSS | IGHV1-69 | IGHJ4 | IGLV1-40 | IGU3 | 2625 | ARDHSGYYDS |
| | 2694 | | NIGAGYDVHWYQQLPGTAPKLLIFGN | (Human) | (Human) | (Human) | (Human) | | TSLMSPFFDY |
| | | | TNRPSGVPDRFSGSKSGTSTSLAITGLQ | | | | | | |
| | | | AEDEADYYCQSYDSSLNGDVFGGGTK | | | | | | |
| | | | LTVL | | | | | | |
| | COV2- | 1617 | EIVLTQSPATLSLSPGERATLSCRASQS | IGHV1-46 | IGHJ5 | IGKV3-11 | IGKJ3 | 2626 | ARDLAGVPA |
| | 2697 | | VSSYLAWYQQKPGQAPRLLIYDAYKR | (Human) | (Human) | (Human) | (Human) | | ALGCWFDP |
| | | | DTGIPARFSGSGSGTDFTLTISSLEPED | | | | | | |
| | | | FAVYYCQQRSNWPLIFTFGPGTKVDIK | | | | | | |
| | COV2- | 1618 | QSVLTQPPSVSGVPGQRVTVSCTGSSS | IGHV3-30 | IGHJ4 | IGLV1-40 | IGU1 | 2627 | AKNLGPYCSG |
| | 2700 | | NIGAGFDVYWYQQFLGTAPKLLIYGN | 3 | (Human) | (Human) | (Human) | | GTCYSLVGDY |
| | | | NNRPSGVPDRFSASKSGTSASLAITGL | (Human) | | | | | |
| | | | QAEDEADYYCQSYDSSLSGYVFGTGTK | | | | | | |
| | | | VTVL | | | | | | |
| | COV2- | 1619 | DIQMTQSPSSLSASVGDRVTITCRASQ | IGHV3-13 | IGHJ4 | IGKV1-39 | IGKJ5 | 2628 | ARARGGYNW |
| | 2703 | | SISSYLNWYQQKPGKAPKLLIYDASSLQ | (Human) | (Human) | (Human) | (Human) | | NFDY |
| | | | SGVPSRFSGSGSGTDFTLTISSLQPEDF | | | | | | |
| | | | ATYYCQQSYSTPPITFGQGTRLEIK | | | | | | |
| | COV2- | 1620 | DIQMTQSPSSLSTSVGDRVTITCRASQ | IGHV3-30 | IGHJ4 | IGKV1-39 | IGKJ1 | 2629 | ARDQGTVVT |
| | 2705 | | SIRSYLNWYQQKPGKAPKLLIYVASSL | (Human) | (Human) | (Human) | (Human) | | HFDY |
| | | | QSGVPSRFSGSGSGTDFTLTISSLQPED | | | | | | |
| | | | FATYYCQQSYSTPPWTFGQGTKVEIK | | | | | | |
| | COV2- | 1621 | DIQMTQSPSSLSASVGDRVTITCQASQ | IGHV3-30 | IGHJ4 | IGKV1-33 | IGKJ3 | 2630 | AKNLGPYCSG |
| | 2709 | | DISNYLNWYQQKPGKAPKLLIYDASNL | (Human) | (Human) | (Human) | (Human) | | GTCYSLVGDY |
| | | | ETGVPSRFSGSGSGTDFTFTISSLQPED | | | | | | |
| | | | IATYYCQQYANLPFTFGPGTKVDIK | | | | | | |
| | COV2- | 1622 | QSVLTQPPSASGTPGQRVTISCSGSNS | IGHV1-8 | IGHJ4 | IGLV1-44 | IGU2 | 2631 | ARMRSGWPT |
| | 2710 | | NIGSYTVNWYQQLPGTAPKLLIFGNN | (Human) | (Human) | (Human) | (Human) | | HGRPDDH |
| | | | QRPSGVPDRFSGSKSGTSASLAISGLQ | | | | | | |
| | | | SEDEADYYCVAWDDSRNGLVFGGGA | | | | | | |
| | | | KLTVL | | | | | | |
| | COV2- | 1623 | SYELTQPPSVSVSPGQTARITCSTDALP | IGHV3-43 | IGHJ6 | IGLV3-25 | IGU2 | 2632 | AKDEMAYPP |
| | 2713 | | NEYIYWYQQKPGQAPVLVIYKDSERPS | (Human) | (Human) | (Human) | (Human) | | SHHYYYYYMD |
| | | | GIPERFSGSSSGTTVTLTISGVQAEDEA | | | | | | V |
| | | | DYYCQSVDSSGTYPHVIFGGGTKLTVL | | | | | | |
| | COV2- | 1624 | DIQMTQSPSSLSASVGDRVTITCRASQ | IGHV1-8 | IGHJ4 | IGKV1-39 | IGKJ2 | 2633 | ARGPSILTGFY |
| | 2717 | | SIISYLNWYHQKPGKAPKLLIYAASSLQ | (Human) | (Human) | (Human) | (Human) | | NPLDY |
| | | | SGVPSRFSGSGSGTDFTLTISSLQPEDF | | | | | | |
| | | | ATYYCQQSYSTPYTFGQGTKLEIK | | | | | | |
| | COV2- | 1625 | DIQLTQSPSFLSASVGDRVTITCRASQG | IGHV4-39 | IGHJ6 | IGKV1-9 | IGKJ4 | 2634 | ARRTYYDLWS |
| | 2718 | | ISSYLAWYQQKPGKAPKLLIYAASTLQS | (Human) | (Human) | (Human) | (Human) | | AYSSTAYYCM |
| | | | GVPSRFSGSGSGTEFTLTISSLQPEDFA | | | | | | DV |
| | | | TYYCQQLNSYPLTFGGGTKVEIK | | | | | | |
| | COV2- | 1626 | QSALTQPASVSGSPGQSITISCTGTSSD | IGHV1-69 | IGHJ6 | IGLV2-14 | IGU2 | 2635 | ARLSGSGWL |
| | 2722 | | VGGYNFVSWYQQHPGKAPKLIIYDVS | (Human) | (Human) | (Human) | (Human) | | GYAMDV |
| | | | NRPSGVSNRFSGSKSGNTASLTISGLQ | | | | | | |
| | | | AEDEADYYCTSYTSSSTLNVVFGGGTK | | | | | | |
| | | | LTVL | | | | | | |
| | COV2- | 1627 | QSALTQPASVSGSPGQSITISCTGTSSD | IGHV3-30 | IGHJ2 | IGLV2-23 | IGU2 | 2636 | ARPSNWYFD |
| | 2726 | | VGSYNLVSWYQQHPGKAPKLMIYEVS | (Human) | (Human) | (Human) | (Human) | | L |
| | | | KRPSGVSNRFSGSKSGNTASLTISGLQ | | | | | | |
| | | | AEDEADYYCCSYASSSIVVFGGGTKLTV | | | | | | |
| | | | L | | | | | | |
| | COV2- | 1628 | DIQMTQSPSSLSASVGDRVTITCRASQ | IGHV3-9 | IGHJ4 | IGKV1-39 | IGKJ1 | 2637 | AKAGYYAYV |
| | 2730 | | SISSYLNWYQQKPGKAPKLLLYAASSL | (Human) | (Human) | (Human) | (Human) | | WGSYRFEYFD |
| | | | QSGVPSRFSGSGSGTDFTLTISSLQPED | | | | | | N |
| | | | FATYYCQQSYSTPPWTFGQGTKVEIK | | | | | | |
| | COV2- | 1629 | DIQLTQSPSFLSASVGDRVTITCRASQG | IGHV3-53 | IGHJ3 | IGKV1-9 | IGKJ3 | 2638 | ARGPEPDAFD |
| | 2733 | | ISSYLAWYQQKPGKAPKLLIYAASTLQS | (Human) | (Human) | (Human) | (Human) | | |
| | | | GVPSRFSGSGSGTEFTLTISSLQPEDFA | | | | | | |
| | | | TYYCQQLNSYSFETFGPGTKVAIK | | | | | | |
| | COV2- | 1630 | NFMLTQPHSVSESPGKTVTFSCTGSSG | IGHV4-61 | IGHJ4 | IGLV6-57 | IGU2 | 2639 | AGSPVPPTIV |
| | 2734 | | SIASNYVQWYQQRPGSAPTTVIYEDN | (Human) | (Human) | (Human) | (Human) | | GASY |
| | | | QRPSGVPDRFSGSIDSSSNSASLTISGL | | | | | | |
| | | | KTEDEADYYCQSYDGINRWLVFGGGT | | | | | | |
| | | | KLTVL | | | | | | |
| | COV2- | 1631 | DIQMTQSPSTLSASIGDRVTITCRASQS | IGHV3- | IGHJ3 | IGKV1-5 | IGKJ2 | 2640 | ARDLSTTWYL |
| | 2736 | | ISSWLAWYQQIPGKAPKLLIYKASSLES | 303 | (Human) | (Human) | (Human) | | EMWGPDAF |
| | | | GVPSRFSGSGSGTEFTLTISSLQPDDFA | (Human) | | | | | DI |
| | | | TYYCQQYNSYPYTFGQGTKLEIK | | | | | | |
| | COV2- | 1632 | DIQMTQSPSSLSASIGDRVTITCRASQ | IGHV3-30 | IGHJ4 | IGKV1-39 | IGKJ2 | 2641 | AKKGGPYCG |
| | 2740 | | NIRSYLNWYQHKPGKAPKLLIYAASTL | (Human) | (Human) | (Human) | (Human) | | GGNCYAGYF |
| | | | QSGVPSRFSGSESGTDFTLTISSLQPED | | | | | | DY |
| | | | FATYYCQQSSSSPITFGQGTKLEIK | | | | | | |
| | COV2- | 1633 | DIQMTQSPSSLSASVGDRVTITCRASQ | IGHV4-34 | IGHJ6 | IGKV1-39 | IGKJ4 | 2642 | ARVGYSQGYY |
| | 2749 | | SISNYLNWYQQKPGKAPKLLIYAASSL | (Human) | (Human) | (Human) | (Human) | | YYYMDV |
| | | | QSGVPSRFSGSGSGTDFSLTISSLQPED | | | | | | |
| | | | FATYSCQQSYTTLLTFGGGTKVEIK | | | | | | |
| | COV2- | 1634 | SYELAQPPSVSVAPGETATIFCRATYIG | IGHV3-9 | IGHJ6 | IGLV3-21 | IGU2 | 2643 | ARDYCSSTTC |
| | 2751 | | RKNVQWYQQKPGQAPVLVVYDDSD | (Human) | (Human) | (Human) | (Human) | | PAETYYYMDV |
| | | | RPSGIPGRFSGSNSGDTATLTISRIEAG | | | | | | |
| | | | DEAAYYCQVWDGINDRVVFGGGTKL | | | | | | |
| | | | TVL | | | | | | |
| | COV2- | 1635 | DIQMTQSPSSLSASVGDRVTITCQASQ | IGHV3-53 | IGHJ5 | IGKV1-33 | IGKJ4 | 2644 | ARDFLRWHD |
| | 2752 | | DINNYLNWYQQKPGKAPKLLIYDASN | (Human) | (Human) | (Human) | (Human) | | L |
| | | | LETGVPLRFSGSGSGTDFTFTISSLQPE | | | | | | |
| | | | DIATYYCQQYDNLPPVFGGGTKVEIK | | | | | | |
| | COV2- | 1636 | DFQMTQSPSSLSASVGDRVTITCRASQ | IGHV3-13 | IGHJ4 | IGKV1-39 | IGKJ1 | 2645 | ARVDFDILTG |
| | 2753 | | SISTYLNWYQQKPGKAPNLLIFAASSLH | (Human) | (Human) | (Human) | (Human) | | YYSN |
| | | | SGVPSRFSGSGSGTDFTLSISSLQPEDF | | | | | | |
| | | | ATYYCQQSYSSEWTFGQGTKVEIK | | | | | | |
| | COV2- | 1637 | QSLLTQPPSVSGAPGQRVTLSCAGATS | IGHV3-23 | IGHJ4 | IGLV1-40 | IGU3 | 2646 | AKWAGPIVM |
| | 2756 | | NIGAGSDVHWYQQLPGTAPKLLIYYN | (Human) | (Human) | (Human) | (Human) | | KYYLQY |
| | | | TNRPSGVPDRFSGSKSATSASLVITGL | | | | | | |
| | | | QTEDEADYYCQSYDISLGGWVFGGGT | | | | | | |
| | | | KLTVL | | | | | | |
| | COV2- | 1638 | DIQMTQSPSSLSASVGDRVTITCRASQ | IGHV3-13 | IGHJ2 | IGKV1-39 | IGKJ5 | 2647 | ARGGDSGYD |
| | 2758 | | SVSIYLNWYQQKPGKAPKLLIYAASSL | (Human) | (Human) | (Human) | (Human) | | LGAWYFDL |
| | | | QSGVPSRFSGSGSGTDFTLTVSSLQPE | | | | | | |
| | | | DFATYYCQQSYSMPPITFGQGTRLEIK | | | | | | |
| | COV2- | 1639 | QSVLTQPPSASGTPGQRVTISCSGSSS | IGHV5-51 | IGHJ5 | IGLV1-44 | IGU3 | 2648 | ARTPTLYNWF |
| | 2759 | | NIGSNSLNWYQQLPGTAPKLLIYSNN | (Human) | (Human) | (Human) | (Human) | | HP |
| | | | QRPSGVPDRFSGSKSGTSASLAISGLQ | | | | | | |
| | | | SEDEADYYCAAWDDSLNGSWVFGGG | | | | | | |
| | | | TKLTVL | | | | | | |
| | COV2- | 1640 | QSVLTQPPSASGTPGQRVTISCSGSRY | IGHV2-70 | IGHJ6 | IGLV1-47 | IGU2 | 2649 | ARATTFFYGM |
| | 2760 | | NIGSNYVYWYQQLPGTAPRLLIYSNN | (Human) | (Human) | (Human) | (Human) | | DV |
| | | | QRPSGVPDRFSGSKSGTSASLAISGLRS | | | | | | |
| | | | EDEADYYCAAWDDSLSGLIFGGGTKLT | | | | | | |
| | | | VQ | | | | | | |
| | COV2- | 1641 | QSALTQPASVSGSPGQSITISCTGTSSD | IGHV4-39 | IGHJ4 | IGLV2-23 | IGU3 | 2650 | ARHQRYCSSS |
| | 2762 | | VGSYNLVSWYQQHPGKAPKLMIYEGS | (Human) | (Human) | (Human) | (Human) | | SCHVWDY |
| | | | KRPSGVSNRFSGSKSGNTASLTISGLQ | | | | | | |
| | | | AEDEADYYCCSYAGSSTWLFGGGTKLT | | | | | | |
| | | | VL | | | | | | |
| | COV2- | 1642 | SYVLTQPPSVSVAPGKTARITCEGNNI | IGHV3-9 | IGHJ6 | IGLV3-21 | IGU2 | 2651 | AKGRGAGYTS |
| | 2765 | | GSKSVHWYQQKPGQAPVLVVYDDSG | (Human) | (Human) | (Human) | (Human) | | YMDV |
| | | | RPSGIPERFSGSNSGNTATLTISRVEAG | | | | | | |
| | | | DEADYFCQVWDSSSDHHVVFGGGTK | | | | | | |
| | | | LTVL | | | | | | |
| | COV2- | 1643 | QSVLTQPPSVSGAPGQRVTISCTGSSS | IGHV3-53 | IGHJ3 | IGLV1-50 | IGU2 | 2652 | ARSYDILTGYR |
| | 2767 | | NIGAGYDVHWYQQLPETAPKLLIYAN | (Human) | (Human) | (Human) | (Human) | | DAFDI |
| | | | SNRPSGVPDRFSGSKSGTSASLAISGL | | | | | | |
| | | | QSEAEADYYCVAWDDSRNGLVFGGG | | | | | | |
| | | | AKLTVL | | | | | | |
| | COV2- | 1644 | QSVLTQPPSVSAAPGQKVTISCSGSSS | IGHV3- | IGHJ6 | IGLV1-51 | IGU1 | 2653 | ARDDNSPQG |
| | 2768 | | NIGNNYVSWYQQLPGTAPKLLIYDNN | 303 | (Human) | (Human) | (Human) | | SGWYFYYYYA |
| | | | ERPSGIPDRFSGSKSGTSATLGITGLQT | (Human) | | | | | MDV |
| | | | GDEADYYCGTWDSSLSAYVFGTGTKV | | | | | | |
| | | | TVL | | | | | | |
| | COV2- | 1645 | SYVLTQPPSVSVAPGKTARITCGGNNI | IGHV3- | IGHJ3 | IGLV3-21 | IGU3 | 2654 | ARDWAPTYY |
| | 2769 | | GNKGVHWYQQKPGQAPVLVVDDDS | 303 | (Human) | (Human) | (Human) | | DMPSAFDI |
| | | | DRPSGIPERFSGSNSGNTATLIISSVEV | (Human) | | | | | |
| | | | GDEADFYCQVWDSSSDHPGVFGGGT | | | | | | |
| | | | KLTVL | | | | | | |
| | COV2- | 1646 | SYELTQPPSVSVSPGQTASITCSGDKLG | IGHV3-7 | IGHJ4 | IGLV3-1 | IGU3 | 2655 | VRLGVSSWYF |
| | 2774 | | DKYACWYQQKPGQSPVLVIYQDTKRP | (Human) | (Human) | (Human) | (Human) | | DY |
| | | | SGIPERFSGSNSGNTATLTISGTQAMD | | | | | | |
| | | | EADYYCQAWGSSRGVFGGGTKLTVL | | | | | | |
| | COV2- | 1647 | SSELTQDPAVSVALGQTVRITCQGDSL | IGHV3-7 | IGHJ6 | IGLV3-19 | IGU3 | 2656 | ARWVEVAT |
| | 2776 | | RSYYASWYQQKPGQAPVVVIYGKNN | (Human) | (Human) | (Human) | (Human) | | NKGIHGVDYY |
| | | | RPSGIPDRFSGSSSGNKASLTITGAQA | | | | | | YYYYMDV |
| | | | GDEADYYCNSRDNSGNLNWVFGGGT | | | | | | |
| | | | KLTVL | | | | | | |
| | COV2- | 1648 | DIQMTQSPSSLSASVGDRVTITCQASQ | IGHV4-34 | IGHJ4 | IGKV1-33 | IGKJ2 | 2657 | ARLRYSSSGG |
| | 2780 | | DINNYLNWYQQKSGKAPKLLIYDASNL | (Human) | (Human) | (Human) | (Human) | | HIFDY |
| | | | ETGVPSRFSGSGSGTDFTFTINSLQPED | | | | | | |
| | | | IATYYCQQYDNLPYTFGQGTKLEIK | | | | | | |
| | COV2- | 1649 | SYELTQPPSVSVSPGQTARITCSGDALP | IGHV1-69 | IGHJ4 | IGLV3-25 | IGU2 | 2658 | ARGLTGSSAY |
| | 2783 | | KQYAYWYQQKPGQAPVLVIYKDTERP | (Human) | (Human) | (Human) | (Human) | | KDEIYFDY |
| | | | SGIPERFSGSSSGTTVTLTISGVQAEDE | | | | | | |
| | | | ADYYCQSADSSGSRFGGGTKLTVL | | | | | | |
| | COV2- | 1650 | EIVMTQSPATLSVSPGERATLSCRASQ | IGHV4-59 | IGHJ6 | IGKV3-15 | IGKJ2 | 2659 | ARDGGNAYS |
| | 2784 | | SVSSNLAWYQQKPGQAPRLLIYGAST | (Human) | (Human) | (Human) | (Human) | | SGWYRYYYH |
| | | | RATVIPARFSGSGSGTEFTLTISSLQSE | | | | | | MDV |
| | | | DFAVYYCQQYNNWPYTFGQGTKLEIK | | | | | | |
| | COV2- | 1651 | DIQMTQSPSSLSASVGDRVTITCRASQ | IGHV3-13 | IGHJ5 | IGKV1-39 | IGKJ1 | 2660 | ARVLYDSSGF |
| | 2786 | | SISSYLNWYQQKPGKAPKLLIYAASSLE | (Human) | (Human) | (Human) | (Human) | | YNWFDP |
| | | | SGVPSRFSGSGSGTDFTLTISSLQPEDF | | | | | | |
| | | | ATYYCQQSYEIPPWTFGQGTKVEIK | | | | | | |
| | COV2- | 1652 | QSVLTQPPSASGTPGQRVTISCSGSSS | IGHV1-46 | IGHJ5 | IGLV1-44 | IGU2 | 2661 | ARGFHVPAAL |
| | 2789 | | NIGSNTVNWYQQLPGTAPKLLIYNNN | (Human) | (Human) | (Human) | (Human) | | RNWFDP |
| | | | QRPSGVPDRLSGSKSGTSASLAISGLQ | | | | | | |
| | | | SEDEADYYCATWDDSLNGPVFGGGT | | | | | | |
| | | | KLTVL | | | | | | |
| | COV2- | 1653 | QSVLTQPPSVSGAPGQRVTISCTGSSS | IGHV3-53 | IGHJ3 | IGLV1-40 | IGU2 | 2662 | ARSYDILTGYR |
| | 2790 | | NIGSGSDVHWYQQLPGTAPKLLIYGN | (Human) | (Human) | (Human) | (Human) | | DAFDI |
| | | | TNRPSGVPDRFSGSKSGTSASLAITGL | | | | | | |
| | | | QAEDEADYYCQSYDSRLSGFVVFGGG | | | | | | |
| | | | TKLTVL | | | | | | |
| | COV2- | 1654 | SYELTQPPSVSVSPGQTARITCSGDALP | IGHV3-7 | IGHJ4 | IGLV3-25 | IGU2 | 2663 | ARVNDGRPN |
| | 2794 | | KQYAYWYHQKPGQAPVLVIYKDSERP | (Human) | (Human) | (Human) | (Human) | | PLEYYFDY |
| | | | SGIPERFSGSSSGTTVTLTISGVQAEDE | | | | | | |
| | | | ADYYCQSADSSGTSVLFGGGTKLTVL | | | | | | |
| | COV2- | 1655 | QSALTQPASVSGSPGQSITISCTGTSSD | IGHV4-31 | IGHJ4 | IGLV2-23 | IGU3 | 2664 | ARETYSAYEM |
| | 2796 | | VGSYNLVSWYQQHPGKAPKLMIYEGS | (Human) | (Human) | (Human) | (Human) | | PPYFDY |
| | | | KRPSGVSNRFSGSKSGNTASLTISGLQ | | | | | | |
| | | | AEDEADYYCCSYARSSTRVFGGGTKLT | | | | | | |
| | | | VL | | | | | | |
| | COV2- | 1656 | SYELTQPPSVSVSPGQTARITCSGDAFP | IGHV5-51 | IGHJ6 | IGLV3-25 | IGU1 | 2665 | ARDLIIESTIAA |
| | 2797 | | KQYGYWYQQKPGQAPVLVIYKDSERP | (Human) | (Human) | (Human) | (Human) | | RPGYYGMDV |
| | | | SGIPERFSGSSSGTTVTLTISGVQAEDE | | | | | | |
| | | | ADYYCQSADSRGAVFGSGTKVTVL | | | | | | |
| | COV2- | 1657 | QSVLTQPPSASGTPGQSVTISCSGSSS | IGHV1-46 | IGHJ4 | IGLV1-44 | IGU1 | 2666 | ARERSGTYFF |
| | 2801 | | NIGNNKVNWYQQLPGTAPKVLIYNSN | (Human) | (Human) | (Human) | (Human) | | DY |
| | | | QRPSGVPDRFSGSKSGTSASLAISGLQ | | | | | | |
| | | | SEDEADYYCAVWDDSLHSYVFGTETK | | | | | | |
| | | | VTVL | | | | | | |
| | COV2- | 1658 | DIQMTQSPSSLSASVGDRVTITCRASQ | IGHV2-70 | IGHJ4 | IGKV1-39 | IGKJ1 | 2667 | ARETPVTAID |
| | 2807 | | SISRYLNWYQQKPGKAPKLLIYTASSLQ | (Human) | (Human) | (Human) | (Human) | | Y |
| | | | SGVPSRFSGSGSGTDFTLTISSLQPEDF | | | | | | |
| | | | ATYYCQQSYSTPRTFGQGTKVEIK | | | | | | |
| | COV2- | 1659 | DIQMTQSPSSLSASVGDRVTITCRASQ | IGHV1-58 | IGHJ3 | IGKV1-33 | IGKJ3 | 2668 | AAPYCSSISCN |
| | 2808 | | SISNYLNWYQQKPGKAPKLLIYDASNL | (Human) | (Human) | (Human) | (Human) | | DGFDI |
| | | | ETGVPSRFSGSGSGTDFTFTISSLQPDD | | | | | | |
| | | | IATYYCQQYDNLPLAFGPGTKVDIK | | | | | | |
| | COV2- | 1660 | DIQMTQSPSSLSASVGDRVTITCRASQ | IGHV1-3 | IGHJ6 | IGKV1-39 | IGKJ4 | 2669 | ASMTRMSEQ |
| | 2809 | | SISNYLNWYQQKPGKAPKLLIYAASSL | (Human) | (Human) | (Human) | (Human) | | TYYGMDV |
| | | | QSGVPSRFSGSGSGTDFSLTISSLQPED | | | | | | |
| | | | FATYSCQQSYTTLLTFGGGTKVEIK | | | | | | |
| | COV2- | 1661 | QSVLTQPPSVSGAPGQRVTISCTGSSS | IGHV3-30 | IGHJ4 | IGLV1-40 | IGU3 | 2670 | ARELMSVG |
| | 2811 | | NIGARYDVHWYQQLPGTAPKLLMYG | (Human) | (Human) | (Human) | (Human) | | |
| | | | NNNRPSGVPDRFSGSKSGTSVSLAITG | | | | | | |
| | | | LQAEDEADYYCQSYDSSLSGWVFGGG | | | | | | |
| | | | TKLTVL | | | | | | |
| | COV2- | 1662 | VIQMTQSPSSLSASVGDRVTITCQASQ | IGHV3-53 | IGHJ6 | IGKV1-33 | IGKJ3 | 2671 | ARDALYYNGP |
| | 2812 | | DINKYLNWYQQKPGKAPKLLIYDASNL | (Human) | (Human) | (Human) | (Human) | | GRDGMDV |
| | | | ETGVPSRFSGSGSGTDFTFTISSLQPED | | | | | | |
| | | | IATYYCQQYANLPFTFGPGTKVDIK | | | | | | |
| | COV2- | 1663 | VIQMTQSPSSLSASVGDRVTITCQASQ | IGHV3-53 | IGHJ6 | IGKV1-33 | IGKJ2 | 2672 | ARDALYYNGP |
| | 2813 | | DINKYLNWYQQKPGKAPKLLIYDASNL | (Human) | (Human) | (Human) | (Human) | | GRDGMDV |
| | | | ETGVPSRFSGSGSGTDFTFTISSLQPED | | | | | | |
| | | | IATYYCQQYDNLPRTFGQGTKLEIK | | | | | | |
| | COV2- | 1664 | QSVLTQPPSVSGAPGQRVTISCTGSSS | IGHV3-30 | IGHJ6 | IGLV1-40 | IGU1 | 2673 | AKDMVEPLFS |
| | 2814 | | NIGAGYDVHWYQQLPGTAPKLLIYGN | (Human) | (Human) | (Human) | (Human) | | HYYYYGMDV |
| | | | SNRPSGVPDRFSGSKSGTSASLAISGL | | | | | | |
| | | | QAEDEADYSCQSYDSSLSGYVFGTGTK | | | | | | |
| | | | VTVL | | | | | | |
| | COV2- | 1665 | QSALTQPASVSGSPGQSITISCTGTSSD | IGHV4-59 | IGHJ4 | IGLV2-23 | IGU2 | 2674 | ARAPRERLQ |
| | 2816 | | VGSYNLVSWYQQHAGKAPKLMIYEVI | (Human) | (Human) | (Human) | (Human) | | WGEYYFDY |
| | | | KRPSGVSNRFSGSKSGNTASLTISGLQ | | | | | | |
| | | | AEDEADYYCCSYAVSTTYVIFGGGTKLT | | | | | | |
| | | | VL | | | | | | |
| | COV2- | 1666 | DIQMTQSPSSLSASVGDRVTITCRASQ | IGHV3-13 | IGHJ6 | IGKV1-39 | IGKJ2 | 2675 | ARVFETKVIR |
| | 2817 | | SISSYLNWYQQKPGKAPKLLIYAASSLQ | (Human) | (Human) | (Human) | (Human) | | GGRYYYYYYM |
| | | | SGVPSRFSGSGSGTDFTLTISSLQPEDF | | | | | | DV |
| | | | ATYYCQQSYSNPSYTFGQGTKLEIK | | | | | | |
| | COV2- | 1667 | EIVLTQSPGTLSLSPGERATLSCRASQS | IGHV4-34 | IGHJ6 | IGKV3-20 | IGKJ2 | 2676 | ARCRQMGNF |
| | 2818 | | VASSYLAWYQQKPGQAPRLLIYGASG | (Human) | (Human) | (Human) | (Human) | | YYYYMDV |
| | | | RATGIPDRFSGSGSGTDFTLTISRLEPE | | | | | | |
| | | | DFAVYYCQQYGSSPPRYTFGQGTKLEI | | | | | | |
| | | | K | | | | | | |
| | COV2- | 1668 | DIQMTQSPSSLSASVGDRVTITCRASQ | IGHV4-31 | IGHJ5 | IGKV1-39 | IGKJ2 | 2677 | ARVVPTRGPV |
| | 2819 | | SISSYLNWYQQRPGKAPKLLIYAASSLQ | (Human) | (Human) | (Human) | (Human) | | AWFDP |
| | | | SGVPSRFSGSGSGTDFTLTISTLQPEDF | | | | | | |
| | | | ATYYCQQSYSTLLYTFGQGTKLEIK | | | | | | |
| | COV2- | 1669 | DIVMTQSPLSLPVTPGEPASISCRSSQS | IGHV3-33 | IGHJ6 | IGKV2-28 | IGKJ3 | 2678 | ARDQSQGAYI |
| | 2820 | | LLHSNGYNYLDWYLQKPGQSPQFLIYL | (Human) | (Human) | (Human) | (Human) | | LTGYRGYGM |
| | | | GSNRASGVPDRFSGSGSGTDFILKISR | | | | | | DV |
| | | | VEAEDVGVYYCMQALQTPFTFGPGTK | | | | | | |
| | | | VDIK | | | | | | |
| | COV2- | 1670 | SYVLTQPPSVSVAPGKTASITCEGNNI | IGHV1-69 | IGHJ4 | IGLV3-21 | IGU1 | 2679 | TTTQGGDYG |
| | 2821 | | GSKSVHWYQQKPGQAPVLVIYYDSDR | (Human) | (Human) | (Human) | (Human) | | DNLYYLDY |
| | | | PSGIPERFSGSNSGNTATLTISRVEAGD | | | | | | |
| | | | EADYYCQVWDSSSDRLYVFGTGTKVT | | | | | | |
| | | | VL | | | | | | |
| | COV2- | 1671 | DIQLTQSPSFLSASVGDRVTITCRASQG | IGHV3-53 | IGHJ3 | IGKV1-9 | IGKJ2 | 2680 | ARGPEPDAFD |
| | 2822 | | ISSYLAWYQQKPGKAPKLLIYAASTLQS | (Human) | (Human) | (Human) | (Human) | | |
| | | | GVPSRFSGSGSGTDFTLTISSLQPEDFA | | | | | | |
| | | | TYYCQQSYSNPSYTFGQGTKLEIK | | | | | | |
| | COV2- | 1672 | QSALTQPASVSGSPGQSITISCTGTSSD | IGHV1-46 | IGHJ4 | IGLV2-23 | IGU3 | 2681 | ARGYGFVPN |
| | 2826 | | VGSYNLVSWYQQHPGKAPKLMIYEGS | (Human) | (Human) | (Human) | (Human) | | VLYYFDY |
| | | | KRPSGVSNRFSGSKSGITASLTISGLQA | | | | | | |
| | | | EDEADYYCCSYAGSSTWLFGGGTKLTV | | | | | | |
| | | | L | | | | | | |
| | COV2- | 1673 | NFMLTQPHSVSESPGKTVTISCTGSSG | IGHV3-21 | IGHJ4 | IGLV6-57 | IGU2 | 2682 | ARGGSILWW |
| | 2828 | | SIASNYVQWYQQRPGSAPTTVIYEDN | (Human) | (Human) | (Human) | (Human) | | LIDY |
| | | | QRPSGVPDRFSGSIDSSSNSASLTISGL | | | | | | |
| | | | KTEDEADYYCQSYDSTSRVVFGGGTKL | | | | | | |
| | | | TVL | | | | | | |
| | COV2- | 1674 | SYVLTQPPSVSVAPGRTARITCGGNNI | IGHV3-23 | IGHJ3 | IGLV3-21 | IGU2 | 2683 | AKDSRSGIAG |
| | 2830 | | GSKSVHWYQQKPGQAPVLVVYDDSD | (Human) | (Human) | (Human) | (Human) | | VDAFDI |
| | | | RPSGIPERFSGSKFGNTATLIISRVEAG | | | | | | |
| | | | DEADYSCQVWDSGSDHVVFGGGTKV | | | | | | |
| | | | TVL | | | | | | |
| | COV2- | 1675 | DIQMTQSPSSLSASVGDRVTITCRASQ | IGHV3-66 | IGHJ4 | IGKV1-39 | IGKJ1 | 2684 | ARGDGGYYS |
| | 2832 | | SISSYLNWYQQKPGKAPKVLIYAASTM | (Human) | (Human) | (Human) | (Human) | | PFDY |
| | | | QSGVPSRFRGSGSGTDFTLTISSLQLED | | | | | | |
| | | | FATYYCQQSYSTPQTFGQGTKVEIK | | | | | | |
| | COV2- | 1676 | QSVLTQPPSVSEAPRQRVTISCSGGSS | IGHV2-5 | IGHJ5 | IGLV1-36 | IGU2 | 2685 | AHRLPTPQLL |
| | 2834 | | NIGNNAVNWYQQLPGKAPKLLIYYDD | (Human) | (Human) | (Human) | (Human) | | PSFENWFDP |
| | | | LLPSGVSDRFSGSKSGTSASLAISGLQS | | | | | | |
| | | | EDEADYYCASWDDSLIGPVFGGGTKL | | | | | | |
| | | | TVL | | | | | | |
| | COV2- | 1677 | DIQLTQSPSFLSASVGDRVTITCRASQG | IGHV3-66 | IGHJ4 | IGKV1-9 | IGKJ2 | 2686 | AREVVGYFDC |
| | 2835 | | ISTYLAWYQQKPGKAPKLLIYAASTLQS | (Human) | (Human) | (Human) | (Human) | | |
| | | | GVPSRFSGSGSGTEFTLTISSLQPEDFA | | | | | | |
| | | | TYYCQQLNSYPGYTFGQGTKLEIK | | | | | | |
| | COV2- | 1678 | NLMLTQPHSVSESPGKTVTISCTGSSG | IGHV4-59 | IGHJ4 | IGLV6-57 | IGU3 | 2687 | ARLRWLRGGI |
| | 2841 | | SIASNYVQWYQQRPGSAPTTVIYEDN | (Human) | (Human) | (Human) | (Human) | | DF |
| | | | QRPSGVPDRFSGSIDSSSNSASLTISGL | | | | | | |
| | | | KTEDEADYYCQSYDSNNQVFGGGTKL | | | | | | |
| | | | TVL | | | | | | |
| | COV2- | 1679 | NFMLTQPHSVSESPGKTVTISCTRSSG | IGHV1-46 | IGHJ4 | IGLV6-57 | IGU2 | 2688 | ARGYGFVPN |
| | 2842 | | SIASSYVQWYQQRPGSAPTTVIYEDN | (Human) | (Human) | (Human) | (Human) | | VLYYFDY |
| | | | QRPSGVPDRFSGSIDSSSNSASLTISGL | | | | | | |
| | | | KTEDEADYYCQSYDSSDVVFGGGTKLT | | | | | | |
| | | | VL | | | | | | |
| | COV2- | 1680 | SYVLTQPPSVSVAPGKTARITCGGNNI | IGHV3- | IGHJ6 | IGLV3-21 | IGU2 | 2689 | ARAQGGNYY |
| | 2844 | | GSKNVHWYQQKPGQAPVKVVYHDG | 303 | (Human) | (Human) | (Human) | | YGMDV |
| | | | DRPSGIPERFSGSNSGNTATLTINRVE | (Human) | | | | | |
| | | | AGDEADYSCQVWDSSSDHHVVFGGG | | | | | | |
| | | | TKLTVL | | | | | | |
| | COV2- | 1681 | SYELTQPPSVSVSPGQTARITCFGDALP | IGHV3-30 | IGHJ6 | IGLV3-25 | IGU3 | 2690 | ARDLAYHPYR |
| | 2848 | | KQYAYWYQQKPGQGPVLVIYKDSERP | (Human) | (Human) | (Human) | (Human) | | DYGDDDYYYY |
| | | | SGIPERFSGSTSGTTVTLTISGVQAEDE | | | | | | YGMDV |
| | | | ADYYCQSADSSGTYRVFGGGTKLTVL | | | | | | |
| | COV2- | 1682 | EIVMTQSPATLSVSPGERVTLSCRASQ | IGHV1-46 | IGHJ4 | IGKV3-15 | IGKJ4 | 2691 | ARGAIPPNSR |
| | 2853 | | SVSSNLAWCQQKPGQAPRLLIYGAST | (Human) | (Human) | (Human) | (Human) | | AEIDY |
| | | | RATGIPARFSGSGSGTEFTLTISSLQSE | | | | | | |
| | | | DFAVYYCQQYYNWPLTFGGGTKVEIK | | | | | | |
| | COV2- | 1683 | SYELTQPPSVSVSPGQTARITCSGDALP | IGHV1-46 | IGHJ6 | IGLV3-25 | IGU2 | 2692 | ARENDYGDY |
| | 2863 | | KQYAYWYQQKPGQAPVLVIYKDSERP | (Human) | (Human) | (Human) | (Human) | | VEPRDYYYG |
| | | | SGIPERFSGSSSGTTVTLTISGVQAEDE | | | | | | MDV |
| | | | ADYYCQSADSSAAYVVFGGGTKLTVL | | | | | | |
| | COV2- | 1684 | SYELTQPPSVSVSPGQTARITCSGDALP | IGHV3-33 | IGHJ3 | IGLV3-10 | IGU3 | 2693 | AREGPFGDRE |
| | 2872 | | KKYTYWYQQKSGQAPVVVIYEDSKRP | (Human) | (Human) | (Human) | (Human) | | ASGAFDV |
| | | | SGIPERFSGSSSGTMATLTISGAQVED | | | | | | |
| | | | EADYYCYSTDSSGKGVFGGGTKLTVL | | | | | | |
| | COV2- | 1685 | SYVLTQPPSVSVAPGKTARITCGGNNI | IGHV3-11 | IGHJ1 | IGLV3-21 | IGU1 | 2694 | TGVVAAPAEY |
| | 2873 | | GSKSVHWYQQKPGQAPVLVVYDDSD | (Human) | (Human) | (Human) | (Human) | | FQH |
| | | | RPSGIPERFSGSNSGNTATLTISRVEAG | | | | | | |
| | | | DEADYYCQVWDSSSDPFYVFGTGTKV | | | | | | |
| | | | TVL | | | | | | |
| | COV2- | 1686 | NFMLTQPHSVSESPGKTVTISCTGSSG | IGHV3-7 | IGHJ4 | IGLV6-57 | IGU3 | 2695 | ARLGFYYGGA |
| | 2878 | | SIASNYVQWYQQRPGSAPTTVISEDN | (Human) | (Human) | (Human) | (Human) | | DY |
| | | | QRPSGVPDRFSGSIDSSSNSASLTISGL | | | | | | |
| | | | KTEDEADYYCQSYDGINRAWVFGGGT | | | | | | |
| | | | KLTVL | | | | | | |
| | COV2- | 1687 | DIVMTQSPDSLAVSLGERATINCKSSQ | IGHV3-30 | IGHJ4 | IGKV4-1 | IGKJ1 | 2696 | AKDGSIAAAD |
| | 2883 | | SVLHSSNNKDSLVWYQQKPGQPPKLL | (Human) | (Human) | (Human) | (Human) | | Y |
| | | | IYWASSRESGVPDRFSGSGSGTDFTLTI | | | | | | |
| | | | SSLQAEDVAVYYCQQYYSTPWTFGQG | | | | | | |
| | | | TKVEIK | | | | | | |
| | COV2- | 1688 | DIQMTQSPSTLSASVGDRVTITCRASQ | IGHV1-46 | IGHJ4 | IGKV1-5 | IGKJ2 | 2697 | ARGAAVPAA |
| | 2891 | | SISSWLAWYQQKPGKAPKLLIYKASSL | (Human) | (Human) | (Human) | (Human) | | GEFDY |
| | | | ESGVPSRFSGSGSGTEFTLTISSLQPDD | | | | | | |
| | | | FATYYCQQYNSYSYTFGQGTKLEIK | | | | | | |
| | COV2- | 1689 | EIVMTQSPATLSVSPGERATLSCRASQ | IGHV3-30 | IGHJ4 | IGKV3-15 | IGKJ4 | 2698 | AKGDGSYLM |
| | 2894 | | SVSNNLAWYQQKPGQAPRLLIYGAST | (Human) | (Human) | (Human) | (Human) | | DYFDY |
| | | | RATGIPVRFSGSGSGTEFTLTISSLQSE | | | | | | |
| | | | DFAVYYCQQYDDWPPEVTFGG | | | | | | |
| | | | GTKVEIK | | | | | | |
| | COV2- | 1690 | QSVLTQPPSVSGAPGQRVTISCTGSSS | IGHV3-53 | IGHJ3 | IGLV1-40 | IGU2 | 2699 | ARSYDILTGYR |
| | 2901 | | NIGSGSDVHWYQQLPGTAPKLLIYGN | (Human) | (Human) | (Human) | (Human) | | DAFDI |
| | | | TNRPSGVPDRFSGSKSGTSASLAITGL | | | | | | |
| | | | QAEDEADYYCVAWDDSRNGLVFGGG | | | | | | |
| | | | AKLTVL | | | | | | |
| | COV2- | 1691 | QSVLTQPPSVSGVPGQRVTVSCTGSSS | IGHV4-34 | IGHJ6 | IGLV1-40 | IGU2 | 2700 | ARCRQMGNF |
| | 2904 | | NIGAGFDVYWYQQFLGTAPKLLIYGN | (Human) | (Human) | (Human) | (Human) | | YYYYMDV |
| | | | NNRPSGVPDRFSASKSGTSASLAITGL | | | | | | |
| | | | QAEDEADYYCQSFDIGRGGWIFGGGT | | | | | | |
| | | | KLTVL | | | | | | |
| | COV2- | 1692 | DIQMTQSPSSLSASVGDRVTITCRPSQ | IGHV5-51 | IGHJ6 | IGKV1-39 | IGKJ5 | 2701 | ARLGSESKIDY |
| | 2906 | | SITTYLNWYQQKPGKAPRLLIYAVSSLQ | (Human) | (Human) | (Human) | (Human) | | YYYGMDV |
| | | | SGVPSRFSGSGSGTDFTLTISSLQPEDF | | | | | | |
| | | | ATYYCQQSYSTPPTFGQGTRLEIK | | | | | | |
| | COV2- | 1693 | QSVLTQPPSVSGAPGQRVTISCTGSSS | IGHV1-69 | IGHJ6 | IGLV1-40 | IGU2 | 2702 | ARGRGYSNY |
| | 2909 | | NIGAGYDVHWYQQLPETAPKLLIYAN | (Human) | (Human) | (Human) | (Human) | | GASYYMDV |
| | | | SNRPSGVPDRFSGSKSGTSASLAITGL | | | | | | |
| | | | QAEDEADYYCQSYDSSLSGSVFGGGT | | | | | | |
| | | | KLTVL | | | | | | |
| | COV2- | 1694 | QSALTQPASVSGSPGQSITISCTGTSSD | IGHV4-39 | IGHJ3 | IGLV2-23 | IGU2 | 2703 | ARMSRGYNY |
| | 2911 | | VGSYNLVSWYQQHPGKAPKLKIYEGS | (Human) | (Human) | (Human) | (Human) | | AYTFDI |
| | | | KRPSGVSNRFSGSKSGNTASLTISGLQ | | | | | | |
| | | | AEDEADYYCCSYAGSVLFGGGTKLTVL | | | | | | |
| | COV2- | 1695 | DIQMTQSPSSLSASAGDRVTITCRASQ | IGHV2-70 | IGHJ3 | IGKV1-39 | IGKJ2 | 2704 | ARTMATINAF |
| | 2919 | | SIRYYLNWYQQKPGKAPKLLIYAASSL | (Human) | (Human) | (Human) | (Human) | | DI |
| | | | QSGVPSRFSGSGSGTDFTLTISSLQPED | | | | | | |
| | | | FAAYYCQQSFSTPRTFGQGTKLEIK | | | | | | |
| | COV2- | 1696 | SYVLTQPPSVSVAPGKTANITCGGNNI | IGHV3- | IGHJ4 | IGLV3-21 | IGU3 | 2705 | ARGGATNFD |
| | 2933 | | GRKSVHWYQQKSGQAPVLVVYDDSD | 303 | (Human) | (Human) | (Human) | | Y |
| | | | RPSGIPERFSGSNSGNTATLTISRVEAG | (Human) | | | | | |
| | | | DEADYYCQVWDSSSDHPEWVFGGGT | | | | | | |
| | | | KLTVL | | | | | | |
| | COV2- | 1697 | DIVMTQSPLSLPVTPGEPASISCRSSQS | IGHV7-4- | IGHJ4 | IGKV2-28 | IGKJ1 | 2706 | ARPGKAAAF |
| | 2934 | | LLHSNGYNFLDWYLQKPGQSPQLLIYL | 1 | (Human) | (Human) | (Human) | | DY |
| | | | GSNRASGVPDRFSGSGSGTDFTLKISR | (Human) | | | | | |
| | | | VQAEDVGVYYCMQALQTPWTFGQG | | | | | | |
| | | | TKVEIK | | | | | | |
| | COV2- | 1698 | SSELTQDPAVSVALGQTVRITCQGDSL | IGHV3-33 | IGHJ6 | IGLV3-19 | IGU3 | 2707 | ARDLHQDWV |
| | 2939 | | RRYYASWYQQKPGQAPVLVIYGKNN | (Human) | (Human) | (Human) | (Human) | | VVVAANVYG |
| | | | RPSGIPDRFSGSSSGNTASLTITGAQAE | | | | | | MDV |
| | | | DEADYYCNSRDSSGNPRWFGGGTKLT | | | | | | |
| | | | VL | | | | | | |
| | COV2- | 1699 | EIVLTQSPGTLSLSPGERATLSCRASQS | IGHV1-58 | IGHJ3 | IGKV3-20 | IGKJ2 | 2708 | AAPYCSSISCN |
| | 2941 | | VSSSYLAWYQQKPGQAPRLLIYGASSR | (Human) | (Human) | (Human) | (Human) | | DGFDI |
| | | | ATGIPDRFSGSGSGTDFTLTISRLEPED | | | | | | |
| | | | FAVYYCQQYGSSPPRYTFGQGTKLEIK | | | | | | |
| | COV2- | 1700 | SYELTQPPSVSVSPGQTARITCSTDALP | IGHV2-70 | IGHJ6 | IGLV3-25 | IGU3 | 2709 | ARATTFFYGM |
| | 2942 | | NEYIYWYQQKPGQAPVLVIYKDSERPS | (Human) | (Human) | (Human) | (Human) | | DV |
| | | | GIPERFSGSSSGTTVTLTISGVQAEDEA | | | | | | |
| | | | DYYCQSVDSSGTYRVFGGGTKLTVL | | | | | | |
| | COV2- | 1701 | DIQMTQSPSSLSASVGDRVTITCQASQ | IGHV3-30 | IGHJ4 | IGKV1-33 | IGKJ3 | 2710 | AKKGGPYCG |
| | 2944 | | DISNYLNWYQQKAGKAPKLLIYDASNL | (Human) | (Human) | (Human) | (Human) | | GGNCYAGYF |
| | | | ETGVPSRFSGSGSGTDFTFTISSLQPDD | | | | | | DY |
| | | | IATYYCQQYDNLPLAFGPGTKVDVK | | | | | | |
| | COV2- | 1702 | DVVMTQSPLSLPVTLGQPASISCRSSQ | IGHV3-9 | IGHJ3 | IGKV2-30 | IGKJ2 | 2711 | AKLDVGGYDF |
| | 2945 | | SLVYSDGNTYLNWFQQRPGQSPRRLI | (Human) | (Human) | (Human) | (Human) | | VSGHYYAFDI |
| | | | YKVSSRDSGVPDRFSGSGSGTAFTLKIS | | | | | | |
| | | | RVEAEDVGVYYCMQGTHWPYTFGQ | | | | | | |
| | | | GTKLEIK | | | | | | |
| | COV2- | 1703 | QSALTQPRSVSGSPGQSVTISCTGTSS | IGHV7-4- | IGHJ6 | IGLV2-11 | IGU3 | 2712 | ARGLISLFRGA |
| | 2947 | | DVGGYTYVSWYQQHPGKAPKLMIYD | 1 | (Human) | (Human) | (Human) | | IFHYYYGMDV |
| | | | VNKRPSGVPDRFSGSKSGITASLTISGL | (Human) | | | | | |
| | | | QAEDEADYYCCSYAGRYTWVFGGGTT | | | | | | |
| | | | LTVL | | | | | | |
| | COV2- | 1704 | DIQLTQSPSFLSASVGDRVTITCRASQG | IGHV3-66 | IGHJ6 | IGKV1-9 | IGKJ5 | 2713 | ARDLVTYGLD |
| | 2952 | | ISNYLAWYQQKPGTAPNLLIYAASTLQ | (Human) | (Human) | (Human) | (Human) | | V |
| | | | SGVPSRFSGSGSGTEFTLTISSLQPEDF | | | | | | |
| | | | ATYYCQLLNSHPLTFGQGTRLEIK | | | | | | |
| | COV2- | 1705 | SYELTQPPSVSVSPGQTARITCSGDALP | IGHV2-5 | IGHJ5 | IGLV3-25 | IGU3 | 2714 | AHSGPPDLSP |
| | 2953 | | KQYAYWYQQKPGQAPVLVIYRDSERP | (Human) | (Human) | (Human) | (Human) | | VLSQGWFDP |
| | | | SGIPERFSGSTSGTTVTLTISGVQAEDE | | | | | | |
| | | | ADYYCQSADSTGWVFGGGTKLTVL | | | | | | |
| | COV2- | 1706 | DIVMTQTPLSLSVTPGQPASFSCKSSQ | IGHV3-30 | IGHJ6 | IGKV2D-29 | IGKJ2 | 2715 | AKGGPNKEVL |
| | 2955 | | SLLHSDGKTYLYWYLQKPGQSPQLLIY | (Human) | (Human) | (Human) | (Human) | | YFGELLDYGM |
| | | | AVSNRFSGVPDRFSGSGSGTDFTLKIS | | | | | | DV |
| | | | RVEAEDVGVYYCMQSIQLPYTFGQGT | | | | | | |
| | | | KLEIK | | | | | | |
| | COV2- | 1707 | DIVVTQTPLSLSVTPGQPASISCKSSET | IGHV1-18 | IGHJ4 | IGKV2D-29 | IGKJ5 | 2716 | ARVQRRRLDY |
| | 2960 | | LLHSDGKTYLSWYLQKPGQPPQLLIYEV | (Human) | (Human) | (Human) | (Human) | | |
| | | | SNRFSGVPDRFSGSGSGTDFTLKIGRV | | | | | | |
| | | | EAEDVGLYYCMQSIQLAFGQGTRLEIE | | | | | | |
| | COV2- | 1708 | ETVLTQSPGTLSLSPGERATLSCRASQS | IGHV1-58 | IGHJ3 | IGKV3-20 | IGKJ1 | 2717 | AAPYCSSISCN |
| | 2961 | | VSSSYLAWYQQKPGQAPRLLIYGASSR | (Human) | (Human) | (Human) | (Human) | | DGFDI |
| | | | ATGIPDRFSGSGSGTDFTLTISRLEPED | | | | | | |
| | | | FAVYYCQHYGSSRGWTFGQGTKVEIK | | | | | | |
| | COV2- | 1709 | EIVMTQSPATLSVSPGERVTLSCRASQ | IGHV1-46 | IGHJ4 | IGKV3-15 | IGKJ4 | 2718 | ARGAIPPNSR |
| | 2997 | | SVSSNLAWCQQKPGQAPRLLIYGAST | (Human) | (Human) | (Human) | (Human) | | AEIDY |
| | | | RATGIPARFSGSGSGTEFTLTISSLQSE | | | | | | |
| | | | DFAVYYCQQYYNWPLTFGGGTKVEIK | | | | | | |
| | COV2- | 1710 | DIQMTQSPSTLSASIGDRVTITCRASQS | IGHV3-30 | IGHJ3 | IGKV1-5 | IGKJ2 | 2719 | ARDLSTTWYL |
| | 3010 | | ISSWLAWYQQIPGKAPKLLIYKASSLES | 3 | (Human) | (Human) | (Human) | | EMWGPDAF |
| | | | GVPSRFSGSGSGTEFTLTISSLQPDDFA | (Human) | | | | | DI |
| | | | TYYCQQYNSYPYTFGQGTKLEIK | | | | | | |
| | COV2- | 1711 | DIQMTQSPSSLSASVGDRVTITCRASQ | IGHV3-13 | IGHJ5 | IGKV1-39 | IGKJ1 | 2720 | ARVLYDSSGF |
| | 3012 | | SISSYLNWYQQKPGKAPKLLIYAASSLE | (Human) | (Human) | (Human) | (Human) | | YNWFDP |
| | | | SGVPSRFSGSGSGTDFTLTISSLQPEDF | | | | | | |
| | | | ATYYCQQSYEIPPWTFGQGTKVEIK | | | | | | |
| | COV2- | 1712 | DIQMTQSPSSLSASVGDRVTITCQASQ | IGHV3-30 | IGHJ4 | IGKV1-33 | IGKJ3 | 2721 | AKNLGPYCSG |
| | 3013 | | DISNYLNWYQQKPGKAPKLLIYDASNL | (Human) | (Human) | (Human) | (Human) | | GTCYSLVGDY |
| | | | ETGVPSRFSGSGSGTDFTFTISSLQPED | | | | | | |
| | | | IATYYCQQYANLPFTFGPGTKVDIK | | | | | | |
| | COV2- | 1713 | EIVLTQSPGTLSLSPGERATLSCRASQS | IGHV1-58 | IGHJ3 | IGKV3-20 | IGKJ1 | 2722 | AAPYCSSISCN |
| | 3025 | | VSSSYLAWYQQKPGQAPRLLIYGASSR | (Human) | (Human) | (Human) | (Human) | | DGFDI |
| | | | ATGIPDRFSGSGSGTDFTLTISRLEPED | | | | | | |
| | | | FAVYYCQHYGSSRGWTFGQGTKVEIK | | | | | | |
| | COV2- | 1714 | SYELTQPPSVSVSPGQTARITCSTDALP | IGHV3-43 | IGHJ6 | IGLV3-25 | IGU2 | 2723 | AKDEMAYPP |
| | 3029 | | NEYIYWYQQKPGQAPVLVIYKDSERPS | (Human) | (Human) | (Human) | (Human) | | SHHYYYYYMD |
| | | | GIPERFSGSSSGTTVTLTISGVQAEDEA | | | | | | V |
| | | | DYYCQSVDSSGTYPHVIFGGGTKLTVL | | | | | | |
| | COV2- | 1715 | QSVLTQPPSVSGAPGQRVTISCTGSSS | IGHV3-7 | IGHJ6 | IGLV1-40 | IGU2 | 2724 | ARLVTTVTTA |
| | 3057 | | NIGAGYDVHWYQQLPGTAPKLLIYGN | (Human) | (Human) | (Human) | (Human) | | NGLYYYSYYY |
| | | | TNRPSGVPDRFSGSKSGTSASLAITGL | | | | | | MDV |
| | | | QAEDEADYYCQSYASSLSAHVVFGGG | | | | | | |
| | | | TKLTVL | | | | | | |
| | COV2- | 1716 | DIVMTQSPDSLAVSLGERATINCKSSQ | IGHV3-30 | IGHJ3 | IGKV4-1 | IGKJ2 | 2725 | ARDRSGNYR |
| | 3058 | | SVLYSSNNENYLAWYQQKPGQPPKLLI | (Human) | (Human) | (Human) | (Human) | | DAFDI |
| | | | YWASTRESGVPDRFSGSGSGTDFTLTI | | | | | | |
| | | | SSLQAEDVAVYYCQQYYSSYTFGQGTK | | | | | | |
| | | | VEIK | | | | | | |
| | COVA1- | 1717 | EIVMTQSPGTLSLSPGERATLSCRASQ | IGHV4-39 | IGHJ4 | IGKV3-20 | IGKJ3 | 2726 | ARVSSGYYFT |
| | 01 | | SVSSSYLAWYQQKPGQAPRLLIYGASS | (Human) | (Human) | (Human) | (Human) | | PFDY |
| | | | RATGIPDRFSGSGSGTDFTLTISRLEPE | | | | | | |
| | | | DFAVYYCQQYGSSPPPFTFGPGTKVDI | | | | | | |
| | | | K | | | | | | |
| | COVA1- | 1718 | NFMLTQPASVSGSPGQSITISCTGASS | IGHV3-30 | IGHJ3 | IGLV2-14 | IGU3 | 2727 | ARARGGSYN |
| | 02 | | DVGGYNYVSWYQQHPGKAPKLMIYD | (Human) | (Human) | (Human) | (Human) | | DAFDI |
| | | | VSNRPSGVSNRFSGSKSGNTASLTISGL | | | | | | |
| | | | QAEDEADYYCSSYTSSSTPVVFGGGTE | | | | | | |
| | | | LTVL | | | | | | |
| | COVA1- | 1719 | DIVMTQSPSSLSASVGDRVTITCRASQ | IGHV3-30 | IGHJ6 | IGKV1-27 | IGKJ3 | 2728 | AKDGQYYDF |
| | 03 | | GISNYLAWYQQKPGKVPKLLIYAASTL | (Human) | (Human) | (Human) | (Human) | | WSGYLGART |
| | | | QSGVPSRFSGSGSGTDFTLTISSLQPED | | | | | | NPHYYYYMD |
| | | | VATYYCQKYNSAPPAFGQGTKVDIK | | | | | | V |
| | COVA1- | 1720 | QSALTQPPSVSVSPGQTASIPCSGDKL | IGHV3-9 | IGHJ6 | IGLV3-1 | IGU3 | 2729 | AKDMGEAVA |
| | 06 | | GDIYACWYQQKPGQSPVLVIYQDTKR | (Human) | (Human) | (Human) | (Human) | | GTHYGMDV |
| | | | PSGIPERFSGSNSGNTATLTISGTOAM | | | | | | |
| | | | DEADYYCQAWGSTTAKVFGGGTKLTV | | | | | | |
| | | | P | | | | | | |
| | COVA1- | 1721 | DIQLTQSPATLSLSPGERATLSCRASQS | IGHV1-69 | IGHJ4 | IGKV3-11 | IGKJ4 | 2730 | ARVGAYDSSG |
| | 07 | | VSSYLAWYQQKPGQAPRLLIYDASNR | (Human) | (Human) | (Human) | (Human) | | YSNDY |
| | | | ATGIPARFSGSGSGTDFTLTISSLEPED | | | | | | |
| | | | FAVYYCQQRSNWPPRVTFGGGTKVEIK | | | | | | |
| | COVA1- | 1722 | QSVLTQPASVSGSPGQSITISCTGTSSD | IGHV3-30 | IGHJ4 | IGLV2-14 | IGU3 | 2731 | AREDYYDSSG |
| | 08 | | VGGYNYVSWYQQHPGKAPKLMIYDV | (Human) | (Human) | (Human) | (Human) | | SFDY |
| | | | SNRPSGVSNRFSGSKSGNTASLTISGL | | | | | | |
| | | | QAEDEADYYCSSYTSSSTRHWVFGGG | | | | | | |
| | | | TKLTVL | | | | | | |
| | COVA1- | 1723 | DIQMTQSPSSLSASVRDRVTITCRASQ | IGHV4-59 | IGHJ3 | IGKV1-39 | IGKJ1 | 2732 | ARHSQGWLQ |
| | 09 | | SITSSLNWYQQKPGKAPKLLIYAASSLQ | (Human) | (Human) | (Human) | (Human) | | QAVAFDI |
| | | | SGVPSRFSGSGSGTDFTLTISSLQPEDF | | | | | | |
| | | | ATYYCQQSYSTPYTFGQGTKVEIK | | | | | | |
| | COVA1- | 1724 | NFMLTQPASVSGSPGQSITISCTGSSS | IGHV3-66 | IGHJ4 | IGLV2-14 | IGU3 | 2733 | ARGGYYYDPS |
| | 10 | | DIAPYTFVSWYQQHSGTAPKLIIYDVR | (Human) | (Human) | (Human) | (Human) | | GYYSRSFSFDY |
| | | | NRPSGISDRFSGSRSGNTASLSISGLQA | | | | | | |
| | | | EDEADYYCSAYTTTSTSWVFGGGTKLT | | | | | | |
| | | | VL | | | | | | |
| | COVA1- | 1725 | QSALTQPPSASGSPGQSVTISCTGTSS | IGHV1-2 | IGHJ6 | IGLV2-8 | IGU3 | 2734 | ARDLVWATV |
| | 12 | | DIGTYNYVSWYQQHPGKAPKLMIYEV | (Human) | (Human) | (Human) | (Human) | | SGTMDV |
| | | | TKRPSGVPDRFSGSKSGNTASLTVSGL | | | | | | |
| | | | QADDEGDYYCSSYVGNNNWVFGGG | | | | | | |
| | | | TKLTVL | | | | | | |
| | COVA1- | 1726 | DIQLTQSPSSLSASVGDRVTITCQASQ | IGHV1-46 | IGHJ1 | IGKV1-33 | IGKJ4 | 2735 | ARPPRNYYDR |
| | 16 | | DISNYLNWYQQRPGKAPKLLIYDASNL | (Human) | (Human) | (Human) | (Human) | | SGYYQRAEYF |
| | | | ETGVPSRFSGSGSGTDFTFTISSLQPED | | | | | | QH |
| | | | IATYYCQQYDNPPLTFGGGTKLEIK | | | | | | |
| | COVA1- | 1727 | QSALTQEPSLTVSPGGTVTLTCGSSTG | IGHV3-66 | IGHJ4 | IGLV7-46 | IGU3 | 2736 | ARVEWAAAG |
| | 18 | | AVTSGHYPYWFQQKPGQAPRTLIYDT | (Human) | (Human) | (Human) | (Human) | | TFY |
| | | | SNKRSWTPARFSGSLLGGKAALTLSGA | | | | | | |
| | | | QPEDEAEYYCLLSYSGVWVFGGGTKL | | | | | | |
| | | | TVL | | | | | | |
| | COVA1- | 1728 | EIVMTQSPATLSVSPGERATLSCRASQ | IGHV3-21 | IGHJ3 | IGKV3-15 | IGKJ1 | 2737 | ARWKSDYYD |
| | 19 | | SVSSNLAWYQQKPGQAPRLLIYGAST | (Human) | (Human) | (Human) | (Human) | | SSGYYPAAFDI |
| | | | RATGIPARFSGSGSGTEFTLTISSLQSE | | | | | | |
| | | | DFAVYYCQQYNNWPPWTFGQGTKV | | | | | | |
| | | | EIK | | | | | | |
| | COVA1- | 1729 | NFMLTQPPSVSVAPGKTARITCGGNN | IGHV3-21 | IGHJ6 | IGLV3-21 | IGU3 | 2738 | AGDQNLYCS |
| | 20 | | IGSKSVHWYQQKPGQAPVLVIYYDSD | (Human) | (Human) | (Human) | (Human) | | GDSCYYHYYG |
| | | | RPSGIPERFSGSNSGNTATLTISRVEAG | | | | | | MDV |
| | | | DEADYYCQVWDSSSDHWVFGGGTKL | | | | | | |
| | | | TVL | | | | | | |
| | COVA1- | 1730 | EIVMTQSPATLSVSPGERATLSYRASQ | IGHV3-30 | IGHJ6 | IGKV3-15 | IGKJ2 | 2739 | ARDSEYYDILT |
| | 21 | | SVSSNLAWYQQKPGQAPRLLIYGAST | (Human) | (Human) | (Human) | (Human) | | GYLAPTHYYY |
| | | | RATGIPARFSGSGSGTEFTLTISSLQSE | | | | | | YYMDV |
| | | | DFAVYYCQQYNNWPPGTFGQGTKLEI | | | | | | |
| | | | K | | | | | | |
| | COVA1- | 1731 | SYELTQPPSVSVSPGQTASITCSGDKLG | IGHV1-18 | IGHJ6 | IGLV3-1 | IGU3 | 2740 | ARDLVDTAM |
| | 22 | | DKYACWYQQKPGQSPVLVTYQDNKR | (Human) | (Human) | (Human) | (Human) | | VQTLDDYGM |
| | | | PSGIPERFSGSNSGNTATLTISGTQAM | | | | | | DV |
| | | | DEADYYCQAWDSSTAVFGGGTKLTVL | | | | | | |
| | COVA1- | 1732 | SYELTQPPSVSVSPGQTARITCSGDALP | IGHV5-51 | IGHJ4 | IGLV3-25 | IGU3 | 2741 | ARYYYDSRGY |
| | 23 | | KQYAYWYQQKPGQAPVLVIYKDSERP | (Human) | (Human) | (Human) | (Human) | | TSIDF |
| | | | SGIPERFSGSSSGTTVTLTISGVQAEDE | | | | | | |
| | | | ADYYCQSADSSGTYSVVFGGGTKLTVL | | | | | | |
| | COVA1- | 1733 | DIQLTQSPSTLSASVGDRVTITCRASQS | IGHV4-39 | IGHJ6 | IGKV1-5 | IGKJ3 | 2742 | ARLNYDFWS |
| | 25 | | ISSWLAWYQQKPGKAPKLLIYKASSLE | (Human) | (Human) | (Human) | (Human) | | GYYSYALYYM |
| | | | SGVPSRFSGSGSGTEFTLTISSLQPDDF | | | | | | DV |
| | | | ATYYCQQYNSYSITFGPGTKVDIK | | | | | | |
| | COVA1- | 1734 | DIVMTQSPSFLSASVGDRVTITCRASQ | IGHV4-31 | IGHJ4 | IGKV1-9 | IGKJ4 | 2743 | ARQQLDYYDS |
| | 26 | | GISSYLAWYQQKPGKAPKLLIYAASTL | (Human) | (Human) | (Human) | (Human) | | SGCFDY |
| | | | QSGVPSRFSGSGSGTEFTLTISSLQPED | | | | | | |
| | | | FATYYCQQLHSYPLTFGGGTKVDIK | | | | | | |
| | COVA1- | 1735 | DVVMTQSPGTLSLSPGERATLSCRAS | IGHV4-59 | IGHJ4 | IGKV3-20 | IGKJ3 | 2744 | ARAMGSYRS |
| | 27 | | QNVSSSYLAWYQQKPGQAPRLLIYGA | (Human) | (Human) | (Human) | (Human) | | PFDY |
| | | | SSRATGIPDRFSGSGSGTDFTLTISRLE | | | | | | |
| | | | PEDFAVYYCQQYGSSPLFTFGPGTKVEI | | | | | | |
| | | | K | | | | | | |
| | COVA2- | 1736 | DIVMTQSPSSLSASVGDRVTITCRASQ | IGHV3-13 | IGHJ2 | IGKV1-39 | IGKJ4 | 2745 | ARGGDRYPV |
| | 01 | | SISSYLNWYQQKPGKAPKLLIYAASSLQ | (Human) | (Human) | (Human) | (Human) | | GYFDL |
| | | | SGVPSRFSGSGSGTDFTLTISSLQPEDF | | | | | | |
| | | | ATYYCQQSYSTPPVTFGGGTKVEIK | | | | | | |
| | COVA2- | 1737 | DIVMTQSPSSLSASVGDRVTITCRASQ | IGHV4-39 | IGHJ6 | IGKV1-39 | IGKJ3 | 2746 | ARRSTSRWG |
| | 02 | | SISNYLNWYQQKPGKAPKLLLYAASDL | (Human) | (Human) | (Human) | (Human) | | YYYMDV |
| | | | QSGVPSRFSGSGSGTDFTLTISSLQPED | | | | | | |
| | | | FATYYCQQSYSTHMSTFGQGTKVDIK | | | | | | |
| | COVA2- | 1738 | EIVMTQSPATLSLSPGERATLSCRASQS | IGHV3-48 | IGHJ4 | IGKV3-11 | IGKJ5 | 2747 | AREANSDFW |
| | 03 | | VSSYLAWYQQKPGQAPRLLIYDASNR | (Human) | (Human) | (Human) | (Human) | | SGYLGYFDY |
| | | | ATGIPARFSGSGSGTDFTLTISSLEPED | | | | | | |
| | | | FAVYYCQQRSNWPQVTFGQGTRLEIK | | | | | | |
| | COVA2- | 1739 | EIVMTQSPGTLSLSPGERATLSCRASQ | IGHV3-53 | IGHJ6 | IGKV3-20 | IGKJ3 | 2748 | ARDLERAGG |
| | 04 | | SVSSSYLAWYQQKPGQAPRLLIYGASS | (Human) | (Human) | (Human) | (Human) | | MDV |
| | | | RATGIPDRFSGSGSGTDFTLTISRLEPE | | | | | | |
| | | | DFAVYYCQQYGSLYTFGQGTKVDIK | | | | | | |
| | COVA2- | 1740 | DIQMTQSPSSLSASVGDRVTITCQASQ | IGHV5-51 | IGHJ6 | IGKV1-33 | IGKJ4 | 2749 | ARHMRPSIAA |
| | 05 | | DISNYLNWYQQKPGKAPKLLIYDASNL | (Human) | (Human) | (Human) | (Human) | | RPGYQYYMD |
| | | | ETGVPSRFSGSGSGTDFTFTISSLQPED | | | | | | V |
| | | | IATYYCQQYDNLPLTFGGGTKLEIK | | | | | | |
| | COVA2- | 1741 | EIVLTQSPGTLSLSPGERATLSCRASQS | IGHV3-53 | IGHJ6 | IGKV3-20 | IGKJ3 | 2750 | AREAYGMDV |
| | 07 | | VSSSYLAWYQQKPGQAPRLLIYGASSR | (Human) | (Human) | (Human) | (Human) | | |
| | | | ATGIPDRFSGSWSGTDFTLTISRLEPED | | | | | | |
| | | | FAVYYCQQYGSSPGTFGQGTKVDIK | | | | | | |
| | COVA2- | 1742 | DIVMTQSPGTLSLSPGERATLSCRASQ | IGHV3-23 | IGHJ1 | IGKV3-20 | IGKJ4 | 2751 | AKGLRGQQL |
| | 10 | | SVSSSYLAWYQQKPGQAPRLLIYGASS | (Human) | (Human) | (Human) | (Human) | | VIPTEYFQH |
| | | | RATGIPDRFSGSGSGTDFTLTISRLEPE | | | | | | |
| | | | DFAVYYCQQYGSSLLTFGGGTKVEIK | | | | | | |
| | COVA2- | 1743 | DIQLTQSPGTLSLSPGERATLSCRASQS | IGHV1-69 | IGHJ4 | IGKV3-20 | IGKJ4 | 2752 | ARGPRGCSST |
| | 11 | | VSSSYLAWYQQKPGQAPRLLIYGASSR | (Human) | (Human) | (Human) | (Human) | | SCYGSYFDY |
| | | | ATGIPDRFSGSGSGTDFTLTISRLEPED | | | | | | |
| | | | FAVYYCQQYGSSPRLTFGGGTKVDIK | | | | | | |
| | COVA2- | 1744 | EIVLTQSPATLSVSPGERATLSCRASQS | IGHV3-21 | IGHJ4 | IGKV3-15 | IGKJ1 | 2753 | ARDQPLPDIL |
| | 12 | | VSSSLAWYQQKPGQAPRLLIYAASTRA | (Human) | (Human) | (Human) | (Human) | | TGYYTGPLDY |
| | | | TGIPARFSGSGSGTEFTLTISSLQSEDF | | | | | | |
| | | | AVYYCQQYNNWPPWTFGQGTKLEIK | | | | | | |
| | COVA2- | 1745 | EIVMTQSPGTLSLSPGERATLSCRASQ | IGHV3-53 | IGHJ6 | IGKV3-20 | IGKJ1 | 2754 | ARDLDTMGG |
| | 13 | | SVSSSYLAWYQQKPGQAPRLLIYGASS | (Human) | (Human) | (Human) | (Human) | | MDV |
| | | | RATGIPDRFSGSGSGTDFTLTISRLEPE | | | | | | |
| | | | DFAVYYCQQYGSSPGTFGQGTKVEIK | | | | | | |
| | COVA2- | 1746 | EIVLTQSPATLSLSPGERATLSCRASQS | IGHV1-69 | IGHJ4 | IGKV3-11 | IGKJ1 | 2755 | ARVRYYDSSG |
| | 14 | | VSSYLAWYQQEPGQAPRLLIYDASNR | (Human) | (Human) | (Human) | (Human) | | YYEDY |
| | | | ATGIPARFSGSGSGTDFTLTISSLEPED | | | | | | |
| | | | FAVYYCQQRSNWPPMYTFGQGTKVEI | | | | | | |
| | | | K | | | | | | |
| | COVA2- | 1747 | DIVMTQSPLSLPVTLGQPASISCRSSQS | IGHV3-23 | IGHJ4 | IGKV2-30 | IGKJ2 | 2756 | AKDTGYCGD |
| | 15 | | LVYSDGNTFLNWFQQRPGQSPRRLIY | (Human) | (Human) | (Human) | (Human) | | DCYIKLIRGGP |
| | | | QVSNRDSGVPDRFSGSGSGTDFTLKIS | | | | | | DY |
| | | | RVEAEDVGVYYCMQGTHWPRTFGQ | | | | | | |
| | | | GTKLEIK | | | | | | |
| | COVA2- | 1748 | DIQLTQSPSSLSASVGDRVTITCRASQG | IGHV1-69 | IGHJ4 | IGKV1-17 | IGKJ1 | 2757 | ASSDSSGFVG |
| | 16 | | IRNDLGWYQQKPGKAPKRLIYAASSL | (Human) | (Human) | (Human) | (Human) | | SRGFDY |
| | | | QSGVPSRFSGSGSGTEFTLTISSLQPED | | | | | | |
| | | | FATYYCLQHNSYPPLFGQGTKVEIK | | | | | | |
| | COVA2- | 1749 | EIVMTQSPATLSLSPGERATLSCRASQS | IGHV1-69 | IGHJ4 | IGKV3-11 | IGKJ1 | 2758 | ASFGDDSGDE |
| | 17 | | VSSYLAWYQQKPGQAPRLLIYDASNR | (Human) | (Human) | (Human) | (Human) | | GVR |
| | | | ATGIPARFSGSGSGTDFTLTISSLEPED | | | | | | |
| | | | FAVYYCQQRSNWPPYTFGQGTKVEIK | | | | | | |
| | COVA2- | 1750 | EIVLTQSPATLSLSPGERATLSCRASQS | IGHV1-69 | IGHJ4 | IGKV3-11 | IGKJ5 | 2759 | ARVYSYDSSG |
| | 18 | | VSSYLAWYQQKPGQAPRLLIYDASNR | (Human) | (Human) | (Human) | (Human) | | YYLEY |
| | | | ATGIPARFSGSGSGTDFTLTISSLEPED | | | | | | |
| | | | FAVYYCQQRSNWPPSITFGQGTRLEIK | | | | | | |
| | COVA2- | 1751 | DVVMTQSPSSLSVSVGDRVTITCRASQ | IGHV3-53 | IGHJ6 | IGKV1-17 | IGKJ1 | 2760 | ASPLLLTPPDY |
| | 20 | | GIRNDLGWYQQKPGKAPKRLIYAASSL | (Human) | (Human) | (Human) | (Human) | | YYYMDV |
| | | | QSGVPSRFSGSGSGTEFTLTISSLQPED | | | | | | |
| | | | FATYYCLQHNSYLWTFGQGTKLEIK | | | | | | |
| | COVA2- | 1752 | AIRMTQSPSSLSASVGDRVTITCQASQ | IGHV4-4 | IGHJ4 | IGKV1-33 | IGKJ5 | 2761 | ARGPRYCSST |
| | 22 | | DISNYLNWYQQKPGKAPKLLIYDASNL | (Human) | (Human) | (Human) | (Human) | | SCYAGVYFDY |
| | | | ETGVPSRFSGSGSGTDFTFTISSLQPED | | | | | | |
| | | | IATYYCQQYDNLPITFGQGTRLEIK | | | | | | |
| | COVA2- | 1753 | EIVLTQSPGTLSLSPGERATLSCRASQS | IGHV1-69 | IGHJ4 | IGKV3-20 | IGKJ4 | 2762 | ARDGFGDVE |
| | 23 | | VSSSYLAWYQQKPGQAPRLLIYGASSR | (Human) | (Human) | (Human) | (Human) | | EMATIKDAFD |
| | | | ATGIPDRFSGSGSGTDFTLTISRLEPED | | | | | | |
| | | | FAVYYCQQYGSSPGVTFGGGTKLEIK | | | | | | |
| | COVA2- | 1754 | AIRMTQSPSSLSASVGDRVTITCRASQ | IGHV5-101 | IGHJ3 | IGKV1-39 | IGKJ2 | 2763 | ARPNPAGGY |
| | 24 | | SISSYLNWYQQKPGKAPKLLIYAASSLQ | (Human) | (Human) | (Human) | (Human) | | DSSGWVDAF |
| | | | SGVPSRFSGSGSGTDFTLTISSLQPEDF | | | | | | DI |
| | | | ATYYCQQSYSTPQTFGQGTKLEIK | | | | | | |
| | COVA2- | 1755 | QPVLTQPASVSGSPGQSITISCTGTSSD | IGHV1-24 | IGHJ5 | IGLV2-14 | IGU3 | 2764 | ATGPTIAAAA |
| | 25 | | VGGYNYVSWYQQHPGKAPKLMIYDV | (Human) | (Human) | (Human) | (Human) | | TNWFDP |
| | | | SNRPSGVSNRFSGSRSGDTASLTISGL | | | | | | |
| | | | QAEDEADYYCSSYTSSSTWVFGGGTKL | | | | | | |
| | | | TVL | | | | | | |
| | COVA2- | 1756 | QLVLTQPPSVSVSPGQTASITCSGDKL | IGHV3-15 | IGHJ6 | IGLV3-1 | IGU3 | 2765 | TTDRGDSYGY |
| | 26 | | GDKYACWYQQKPGQSPVLVIYQDSKR | (Human) | (Human) | (Human) | (Human) | | YYCMDV |
| | | | PSGIPERFSGSNSGNTATLTISGTQAM | | | | | | |
| | | | DEADYYCQAWDSSTAVVFGGGTKLTV | | | | | | |
| | | | L | | | | | | |
| | COVA2- | 1757 | EIVMTQSPATLSVSPGERATLSCRASQ | IGHV3-33 | IGHJ4 | IGKV3-15 | IGKJ5 | 2766 | AKDKAPPCSS |
| | 28 | | SVSSNLAWYQHKPGQAPRLLIYGASTR | (Human) | (Human) | (Human) | (Human) | | GWYYFDY |
| | | | ATGIPARFSGSGSGTEFTLTISSLQSED | | | | | | |
| | | | FAVYYCQQYNYWPLITFGQGTRLEIK | | | | | | |
| | COVA2- | 1758 | DIVMTQSPSSLSASVGDRVTITCRASQ | IGHV3-30 | IGHJ3 | IGKV1-39 | IGKJ1 | 2767 | ARGVEDPVV |
| | 29 | | SISSYLNWYQQKPGKAPKLLIYAASSLQ | (Human) | (Human) | (Human) | (Human) | | PAAIPWCWF |
| | | | SGVPSRFSGSGSGTDFTLTISSLQPEDF | | | | | | DP |
| | | | ATYYCQQSYSTPRTFGQGTKVEIK | | | | | | |
| | COVA2- | 1759 | QSVLTQPPSVSVAPGQTARITCGGNNI | IGHV4-30 | IGHJ5 | IGLV3-21 | IGU3 | 2768 | ASLPVVPAAI |
| | 30 | | GSKSVHWYQQKPGQAPVLVVYDDSD | (Human) | (Human) | (Human) | (Human) | | GPLPAFDI |
| | | | RPSGIPERFSGSNSGNTATLTISRVEAG | | | | | | |
| | | | DEADYYCQVWASSSVVFGGGTKLTVL | | | | | | |
| | COVA2- | 1760 | DIVMTQTPLSLSVTPGQPASISCKSGQ | IGHV1-2 | IGHJ3 | IGKV2D-29 | IGKJ1 | 2769 | RKMLTIFGKV |
| | 31 | | SLLHSDGKTYLYWYLQKPGQPPQLLIY | (Human) | (Human) | (Human) | (Human) | | NQTMLLISGA |
| | | | EVSNRFSGVPDRFSGSGSGTDFTLKISR | | | | | | KGQ |
| | | | VEAEDVGVYYCMQSIQLPPTFGQGTK | | | | | | |
| | | | VEIK | | | | | | |
| | COVA2- | 1761 | DIVMTQSPATLSLSPGERATLSCRASQ | IGHV1-69 | IGHJ4 | IGKV3-11 | IGKJ4 | 2770 | ARTHSYDNSG |
| | 32 | | SVSSFLAWYQQKPGQAPRLLIYDASNR | (Human) | (Human) | (Human) | (Human) | | QYFDY |
| | | | ATGIPARFSGSGSGTDFTLTISSLEPED | | | | | | |
| | | | FAVYYCQQRSNWPPRLTFGGGTKVDIK | | | | | | |
| | COVA2- | 1762 | QSALTQPASVSGSPGQSITISCTGTSSD | IGHV5-101 | IGHJ6 | IGLV2-23 | IGU3 | 2771 | ARLKVITIFGV |
| | 33 | | VGSYNLVSWYQQHPGKAPKLMIYDSS | (Human) | (Human) | (Human) | (Human) | | VRDDYGMDV |
| | | | KRPSGVSNRFSGSKSGNTASLTISGLQ | | | | | | |
| | | | AEDEADYYCCSYAGSVFGGGTKLTVL | | | | | | |
| | COVA2- | 1763 | QTVVTQPASVSGSPGQSITISCTGTSSD | IGHV3-30 | IGHJ4 | IGLV2-14 | IGU1 | 2772 | ARSASGSYYG |
| | 34 | | VGGYNYVSWYQQHPGKAPKLMIYDV | (Human) | (Human) | (Human) | (Human) | | AFDY |
| | | | SNRPSGVSNRFSGSKSGNTASLTISGL | | | | | | |
| | | | QAEDEADYYCSSYTSSSTLGLYVFGTGT | | | | | | |
| | | | KVTVL | | | | | | |
| | COVA2- | 1764 | QSVLTQPPSVSGAPGQRVTISCTGSSS | IGHV1-24 | IGHJ5 | IGLV1-40 | IGU3 | 2773 | ATSPAVMSV |
| | 37 | | NIGAGYDVHWYQQLPGTAPKVLIYDN | (Human) | (Human) | (Human) | (Human) | | GWVDP |
| | | | NNRPSGVPDRFSGSKSGTSASLAITGL | | | | | | |
| | | | QAEDEADYYCQSYDSSLSGSVFGGGT | | | | | | |
| | | | KLTVL | | | | | | |
| | COVA2- | 1765 | DIQLTQSPSSLSASVGDRVTITCRASQG | IGHV4-39 | IGHJ3 | IGKV1-17 | IGKJ4 | 2774 | ARQVRQWLE |
| | 38 | | IRNDLGWYQQKPGKAPKRLIYAASSL | (Human) | (Human) | (Human) | (Human) | | DDAFDI |
| | | | QSGVPSRFSGSGSGTEFTLTISSLQPED | | | | | | |
| | | | FATYYCLQHNSYPLTFGGGTKVDIK | | | | | | |
| | COVA2- | 1766 | QSALTQPASVSGSPGQSITISCTGTSSD | IGHV3-53 | IGHJ3 | IGLV2-23 | IGU3 | 2775 | ARAHVDTAM |
| | 39 | | VGSYNLVSWYQQHPGKAPKLMIYEVT | (Human) | (Human) | (Human) | (Human) | | VESGAFDI |
| | | | KRPSGVSNRFSGSKSGNTASLTISGLQ | | | | | | |
| | | | AEDEADYYCCSYAGSSTWVFGGGTKL | | | | | | |
| | | | TVL | | | | | | |
| | COVA2- | 1767 | QSVLTQPASVSGSPGQSITISCTGTSSD | IGHV4-4 | IGHJ5 | IGLV2-23 | IGU3 | 2776 | AGRYCSGGRC |
| | 40 | | VGSYNLVSWYQQHPGKAPKLMIYEAS | (Human) | (Human) | (Human) | (Human) | | GWFDP |
| | | | KRPSGISNRFSGSKSGNTASLTISGLQA | | | | | | |
| | | | EDEADYYCCSYAGSSTWVFGGGTKPT | | | | | | |
| | | | VL | | | | | | |
| | COVA2- | 1768 | DIVMTQSPATLSVSPGERATLSCRASQ | IGHV3-21 | IGHJ6 | IGKV3-15 | IGKJ1 | 2777 | ARVQKDIVVV |
| | 41 | | SVSSNLAWYQQKPGQAPRLLIYGAST | (Human) | (Human) | (Human) | (Human) | | PVALADYYYY |
| | | | RATGIPARFSGSGSGTEFTLTISSLQPE | | | | | | GMDV |
| | | | DFAVYYCQQCYNWPPWTFGQGTRVE | | | | | | |
| | | | FK | | | | | | |
| | COVA2- | 1769 | DIVMTQSPSSLSASVGDRVTITCRASQ | IGHV1-18 | IGHJ4 | IGKV1-17 | IGKJ4 | 2778 | ARFDYGYPYS |
| | 43 | | GIRNDLGWYQQKPGKAPKRLIYAASSL | (Human) | (Human) | (Human) | (Human) | | SWSVLSIDY |
| | | | QSGVPSRFSGSGSGTEFTLTISSLQPED | | | | | | |
| | | | FATYYCLQHNSYPLTFGGGTKLEIK | | | | | | |
| | COVA2- | 1770 | AIRMTQSPSSLSASVGDRVTITCRASQ | IGHV3-30 | IGHJ4 | IGKV1-39 | IGKJ2 | 2779 | AREGSRQWL |
| | 44 | | SISSYLNWYQQKPGKAPKLLIYAASSLQ | (Human) | (Human) | (Human) | (Human) | | VIYFDY |
| | | | SGVPSRFSGSGSGTDFTLTISSLQPEDF | | | | | | |
| | | | ATYYCQQSYTTFIYTFGQGTKLEIK | | | | | | |
| | COVA2- | 1771 | DIVMTQSPGTLSLSPGERATLSCRASQ | IGHV1-2 | IGHJ5 | IGKV3-20 | IGKJ1 | 2780 | ARGDGDYYD |
| | 45 | | SVSSSYLAWYQQKPGQAPRLLIYGASS | (Human) | (Human) | (Human) | (Human) | | SSGYYRPTLY |
| | | | RATGIPDRFSGSGSGTDFTLTISRLEPE | | | | | | NWLDP |
| | | | DFAVYYCQQYGSSPYTFGQGTKVEIK | | | | | | |
| | COVA2- | 1772 | AIRMTQSPSSLSASVGDRVTITCQASQ | IGHV4-39 | IGHJ4 | IGKV1-33 | IGKJ4 | 2781 | ARHPSGLYQL |
| | 46 | | DISNYLNWYQQKPGKAPKLLIYDASNL | (Human) | (Human) | (Human) | (Human) | | LN |
| | | | ETGVPSRFSGSGSGTDFTFTISSLQPED | | | | | | |
| | | | IATYYCQQYDNLLSLTFGGGTKVEIK | | | | | | |
| | COVA2- | 1773 | EIVLTQSPDSLAVSLGERATINCKSSQS | IGHV3-9 | IGHJ4 | IGKV4-1 | IGKJ4 | 2782 | AKVATYYYDR |
| | 47 | | VLYSSNNKNYLAWYQQKPGQPPKLLI | (Human) | (Human) | (Human) | (Human) | | SGYYYGGALD |
| | | | YWASTRESGVPDRFSGSGSGTHFTLTI | | | | | | Y |
| | | | SSLQAEDVAVYYCQQYYSTPPLTFGGG | | | | | | |
| | | | TKVDIK | | | | | | |
| | COVA3- | 1774 | EIVMTQSPSSLSASVGDRVTITCRASQS | IGHV4-59 | IGHJ6 | IGKV1-39 | IGKJ4 | 2783 | ARGPAATYYY |
| | 01 | | MSSYLNWYQQKPGKAPKLLIYAASSL | (Human) | (Human) | (Human) | (Human) | | YMDV |
| | | | QSGVPSRFSGSGSGTDFTLTISSLQPED | | | | | | |
| | | | FATYYCQQSYSTLTFGGGTKVEIK | | | | | | |
| | COVA3- | 1775 | QTVVTQPPSVSVSPGQTARITCSGDAL | IGHV3-23 | IGHJ4 | IGLV3-25 | IGU3 | 2784 | AKEIAVAGCF |
| | 03 | | PKQYAYWYQQKPGQAPVLVIYKDSER | (Human) | (Human) | (Human) | (Human) | | DY |
| | | | PSGIPERFSGSSSGTTVTLTISGVQAED | | | | | | |
| | | | EADYYCQSADSSGTYRVFGGGTKLTVL | | | | | | |
| | COVA3- | 1776 | QPVLTQPPSVSVAPGQTARITCGGNN | IGHV3-33 | IGHJ4 | IGLV3-21 | IGU1 | 2785 | ARVGSVKSTA |
| | 04 | | IGSKSVHWYQQKPGQAPVLVVYDDS | (Human) | (Human) | (Human) | (Human) | | GYDFWSGDP |
| | | | DRPSGIPERFSGSNSGNTATLTISRVEA | | | | | | FDY |
| | | | GDEADYYCQVWDSSSDHYVFGTGTK | | | | | | |
| | | | VTVL | | | | | | |
| | COVA3- | 1777 | NFMLTQPPSASGTPGQRVTISCSGSSS | IGHV1-24 | IGHJ4 | IGLV1-44 | IGU3 | 2786 | ATAYSVDTA |
| | 05 | | NIGSNTVNWYQQLPGTAPKLLIYSNN | (Human) | (Human) | (Human) | (Human) | | MVRGVGY |
| | | | QRPSGVPDRFSGSKSGTSASLAISGLQ | | | | | | |
| | | | SEDEADYYCAAWDDSLNGPHWVFGG | | | | | | |
| | | | GTKLTVL | | | | | | |
| | COVA3- | 1778 | DVVMTQSPDSLAVSLGERATINCKSS | IGHV1-69 | IGHJ4 | IGKV4-1 | IGKJ4 | 2787 | ARDAPDYYDS |
| | 06 | | QSVLYSSNNKNYLAWYQQKPGQPPKL | (Human) | (Human) | (Human) | (Human) | | SGPTYFDY |
| | | | LIYWASTRESGVPDRFSGSGSGTDFTL | | | | | | |
| | | | TISSLQAEDVAVYYCQQYYSTPLTFGG | | | | | | |
| | | | GTKVDIK | | | | | | |
| | COVA3- | 1779 | EIVLTQSPGTLSLSPGERATLSCRASQS | IGHV3-9 | IGHJ6 | IGKV3-20 | IGKJ3 | 2788 | AKMGPDPAH |
| | 07 | | VSSSYLAWYQQKPGQAPRLLIYGASSR | (Human) | (Human) | (Human) | (Human) | | DYGRKNDAF |
| | | | ATGIPDRFSGSGSGTDFTLTISRLEPED | | | | | | DI |
| | | | FAVYYCQQYGSSPFTFGPGTKLEIK | | | | | | |
| | COVA3- | 1780 | DIVMTQSPSSLSASVGDRVTITCRASQ | IGHV4-59 | IGHJ6 | IGKV1-39 | IGKJ4 | 2789 | AKAEPEVGGY |
| | 08 | | SISSYLNWYQQKPGKAPKLLIYAASSLQ | (Human) | (Human) | (Human) | (Human) | | DYYMDV |
| | | | SGVPSRFSGSGSGTDFTLTISSLQPEDF | | | | | | |
| | | | ATYYCQQSYSTPLTFGPGTKLEIK | | | | | | |
| | COVA3- | 1781 | DIVMTQSPSSLSASVGDRVTITCRASQ | IGHV3-9 | IGHJ3 | IGKV1-39 | IGKJ4 | 2790 | ARGPAATYYY |
| | 09 | | SMSSYLNWYQQKPGKAPKLLIYAASSL | (Human) | (Human) | (Human) | (Human) | | YMDV |
| | | | QSGVPSRFSGSGSGTDFTLTISSLQPED | | | | | | |
| | | | FATYYCQQSYSTLTFGGGTKLEIK | | | | | | |
| | COVA3- | 1782 | DIVMTQSPDSLAVSLGERATINCKSSQ | IGHV5-51 | IGHJ6 | IGKV4-1 | IGKJ5 | 2791 | ARRGYTYGAD |
| | 10 | | SVLYSSNNKNYLAWYQQKPGQPPKLLI | (Human) | (Human) | (Human) | (Human) | | FYGLDV |
| | | | YWASTRESGVPDRFSGSGSGTDFTLTI | | | | | | |
| | | | SSLQAEDVAVYYCQQYYSTPITFGQGT | | | | | | |
| | | | RLEIK | | | | | | |
| | CR3022 | 1783 | DIQLTQSPDSLAVSLGERATINCKSSQS | IGHV5-51 | IGHJ6 | IGKV4-1 | IGKJ1 | 2792 | AGGSGISTPM |
| | | | VLYSSINKNYLAWYQQKPGQPPKLLIY | (Human) | (Human) | (Human) | (Human) | | DV |
| | | | WASTRESGVPDRFSGSGSGTDFTLTIS | | | | | | |
| | | | SLQAEDVAVYYCQQYYSTPYTFGQGT | | | | | | |
| | | | KVEIK | | | | | | |
| | CV-X1- | | ND | IGHV3-53 | IGHJ6 | ND | ND | 2793 | ARDLSEGGM |
| | 126 | | | (Human) | (Human) | | | | DV |
| | CV-X2- | | ND | IGHV1-69 | IGHJ6 | ND | ND | 2794 | ATRKETTVTTS |
| | 106 | | | (Human) | (Human) | | | | LVYGMDV |
| | CV05-163 | | ND | IGHV1-2 | IGHJ6 | ND | ND | 2795 | AREVMVRGA |
| | | | | (Human) | (Human) | | | | LPPYGMDV |
| | CV07-200 | | ND | IGHV1-2 | IGHJ6 | ND | ND | 2796 | ARGPFYYDNS |
| | | | | (Human) | (Human) | | | | GTLGGLDV |
| | CV07-209 | | ND | IGHV3-11 | IGHJ4 | ND | ND | 2797 | ARDGVIPPRF |
| | | | | (Human) | (Human) | | | | DY |
| | CV07-222 | | ND | IGHV1-2 | IGHJ3 | ND | ND | 2798 | ARGPYYYDSS |
| | | | | (Human) | (Human) | | | | GSLGAFDI |
| | CV07-250 | | ND | IGHV1-18 | IGHJ6 | ND | ND | 2799 | AGSDNYGFPY |
| | | | | (Human) | (Human) | | | | NGMDV |
| | CV07-255 | | ND | IGHV1-2 | IGHJ4 | ND | ND | 2800 | ARDSRFSYVN |
| | | | | (Human) | (Human) | | | | GEFDY |
| | CV07-262 | | ND | IGHV1-2 | IGHJ6 | ND | ND | 2801 | ARVGWYDFG |
| | | | | (Human) | (Human) | | | | TPGDYYYYYG |
| | | | | | | | | | MDV |
| | CV07-270 | | ND | IGHV1-2 | IGHJ6 | ND | ND | 2802 | ARVFGPGLDC |
| | | | | (Human) | (Human) | | | | SSTSCYTYGM |
| | | | | | | | | | DV |
| | CV07-283 | | ND | IGHV1-2 | IGHJ6 | ND | ND | 2803 | VRGPFYYDSS |
| | | | | (Human) | (Human) | | | | GPLGGMDV |
| | CV07-287 | | ND | IGHV1-58 | IGHJ3 | ND | ND | 2804 | AAPYCSSTNC |
| | | | | (Human) | (Human) | | | | YDAFDI |
| | CV07-315 | | ND | IGHV3-9 | IGHJ6 | ND | ND | 2805 | AKDFLWDLH |
| | | | | (Human) | (Human) | | | | PPRYYGMDV |
| | CV1 | 1784 | QSVLTQPPSASGTPGQRVTISCSGSSS | IGHV4- | IGHJ2 | IGLV1-44 | IGU3 | 2806 | ARTPLSLRLRY |
| | | | NIGSNTVNWYQQLPGTAPKLLIYSNN | 382 | (Human) | (Human) | (Human) | | NWYFDL |
| | | | QRPSGVPDRFSGSKSGTSASLAISGLQ | (Human) | | | | | |
| | | | SEDEADYYCAAWDDSLNGPVFGGGT | | | | | | |
| | | | KLTVL | | | | | | |
| | CV10 | 1785 | EIVLTQSPGTLSLSPGERATLSCRASQS | IGHV4-59 | IGHJ4 | IGKV3-20 | IGKJ1 | 2807 | ARGFDY |
| | | | VSSIYLAWYQQKPGQAPRLLIYGASSR | (Human) | (Human) | (Human) | (Human) | | |
| | | | ATGIPDRFSGSGSGTDFTLTISRLEPED | | | | | | |
| | | | FAVYYCQQYAGSPWTFGQGTKVEIK | | | | | | |
| | CV11 | 1786 | EIVLTQSPATLSLSPGERATLSCRASQS | IGHV4-31 | IGHJ4 | IGKV3-11 | IGKJ3 | 2808 | ARETTGHFDY |
| | | | VSSYLAWYQQKPGQAPRLLIYDASNR | (Human) | (Human) | (Human) | (Human) | | |
| | | | ATGIPARFSGSGSGTDFTLTISSLEPED | | | | | | |
| | | | FAVYYCQQRSNWPPIFTFGPGTKVDIK | | | | | | |
| | CV12 | 1787 | DVVMTQSPLSLPVTLGQPATISCRSSQ | IGHV3-30 | IGHJ4 | IGKV2-30 | IGKJ1 | 2809 | VRGGVSGPN |
| | | | SLVYSDGNTYVNWFQQRPGQSPRRLI | (Human) | (Human) | (Human) | (Human) | | SFDM |
| | | | YQVSIRASGVPDRFSGSGSGTDFALKIS | | | | | | |
| | | | RVEAEDVGVYYCMQGTHWPVTFGQ | | | | | | |
| | | | GTKVEIK | | | | | | |
| | CV13 | 1788 | DIQMTQSPSSLSASVGDRVTITCRASQ | IGHV7-4- | IGHJ4 | IGKV1-39 | IGKJ3 | 2810 | ARASARPGVA |
| | | | NIDNYLNWYQQKPGKAPKLLIYAASRL | 1 | (Human) | (Human) | (Human) | | TNLDF |
| | | | HSGVPSRFSGSGSGTDFTLIISSLQPED | (Human) | | | | | |
| | | | LATYYCQQSYSNPLTFGPGTKVDIR | | | | | | |
| | CV15 | 1789 | QSALTQPRSVSGSPGQSVTISCTGTSS | IGHV3-7 | IGHJ6 | IGLV2-11 | IGU3 | 2811 | ARDFNSYQLL |
| | | | DVGGYNYVSWYQQHPGKAPKLMIYD | (Human) | (Human) | (Human) | (Human) | | WYYYYGMDV |
| | | | VSKRPSGVPDRFSGSKSGNTASLTISGL | | | | | | |
| | | | QAEDEADYYCCSYAGSYTWVFGGGTK | | | | | | |
| | | | LTVL | | | | | | |
| | CV16 | 1790 | EIVLTQSPGTLSLSPGERATLSCRASQS | IGHV5-51 | IGHJ6 | IGKV3-20 | IGKJ1 | 2812 | ARQSSFYSSG |
| | | | VSSSYLAWYQQKPGQAPRLLIYGASSR | (Human) | (Human) | (Human) | (Human) | | WYSYGMDV |
| | | | ATGIPDRFSGSGSGTDFTLTISRLEPED | | | | | | |
| | | | FAVYYCQQYGSSRGTFGQGTKVEIK | | | | | | |
| | CV17 | 1791 | QSALTQPASVSGSPGQSITISCTGTSSD | IGHV1-2 | IGHJ5 | IGLV2-23 | IGU1 | 2813 | ARVDYGSGSY |
| | | | VGSYNLVSWYQQHPGKAPKLMIYEGS | (Human) | (Human) | (Human) | (Human) | | GWGWFDP |
| | | | KRPSGVSNRFSGSKSGNTASLTISGLQ | | | | | | |
| | | | AEDEADYYCCSYAGSSTYVFGTGTKVT | | | | | | |
| | | | VL | | | | | | |
| | CV18 | 1792 | QSVLTQPPSVSAAPGQKVTISCSGSSS | IGHV1-24 | IGHJ5 | IGLV1-51 | IGU3 | 2814 | ATTSPIVGAIT |
| | | | NIGNNYVSWYQQLPGTAPKLLIYDNN | (Human) | (Human) | (Human) | (Human) | | WFDP |
| | | | KRPSGIPDRFSGSKSGTSATLGITGLQT | | | | | | |
| | | | GDEADYYCGTWDSSLSAGPVFGGGT | | | | | | |
| | | | KLTVL | | | | | | |
| | CV19 | 1793 | EIVLTQSPGTLSLSPGERATLSCRASQS | IGHV1-2 | IGHJ6 | IGKV3-20 | IGKJ2 | 2815 | AREYYYDSSV |
| | | | VSSSYLAWYQQKPGQAPRLLIYGASSR | (Human) | (Human) | (Human) | (Human) | | YPYYYYAMDV |
| | | | ATGIPDRFSGSGSGTDFTLTISRLEPED | | | | | | |
| | | | FAVYYCQQYGSSPPKYTFGQGTKLEIK | | | | | | |
| | CV2 | 1794 | EIVMTQSPATLSVSPGERATLSCRASQ | IGHV3-30 | IGHJ4 | IGKV3-15 | IGKJ4 | 2816 | ARVRGSYYLF |
| | | | SVSSNLAWYQQKPGQAPRLLIYGAST | (Human) | (Human) | (Human) | (Human) | | DY |
| | | | RATGIPARFSGSGSGTEFTLTISSLQSE | | | | | | |
| | | | DFAVYYCQQYNNWPPSLTFGGGTKV | | | | | | |
| | | | EIK | | | | | | |
| | CV21 | 1795 | EIVLTQSPATLSLSPGERATLSCRASQS | IGHV3-15 | IGHJ4 | IGKV3-11 | IGKJ4 | 2817 | TTDRVYDYIW |
| | | | VSSYLAWYQQKPGQAPRLLIYDASNR | (Human) | (Human) | (Human) | (Human) | | GSYRYLDY |
| | | | ATGIPARFSGSGSGTDFTLTISSLEPED | | | | | | |
| | | | FAVYYCQQRSNWPLTFGGGTKVEIK | | | | | | |
| | CV22 | 1796 | QLVLTQSPSASASLGASVKLTCTLSSGH | IGHV3-21 | IGHJ4 | IGLV4-69 | IGU3 | 2818 | ARDRESYDILT |
| | | | SSYAIAWHQQQPEKGPRYLMKLNSD | (Human) | (Human) | (Human) | (Human) | | GYSMEGCFD |
| | | | GSHSKGDGIPDRFSGSSSGAERYLTISS | | | | | | Y |
| | | | LQSEDEADYYCQTWGTGIRVFGGGTK | | | | | | |
| | | | LTVL | | | | | | |
| | CV23 | 1797 | SYELTQPPSVSVSPGQTARITCSGDALP | IGHV1-3 | IGHJ3 | IGLV3-25 | IGU3 | 2819 | ARVWGYCSG |
| | | | KQYAYWYQQKPGQAPVLVIYKDSERP | (Human) | (Human) | (Human) | (Human) | | GSCYVDAFDI |
| | | | SGIPERFSGSSSGTTVTLTISGVQAEDE | | | | | | |
| | | | ADYYCQSADSSGTYVVFGGGTKLTVL | | | | | | |
| | CV24 | 1798 | QSVLTQPPSVSAAPGQKVTISCSGSSS | IGHV1-24 | IGHJ5 | IGLV1-51 | IGU1 | 2820 | ATAPPYSPPSS |
| | | | NIGNNYVSWYQQLPGTAPKLLIYDNN | (Human) | (Human) | (Human) | (Human) | | WFDP |
| | | | KRPSGIPDRFSGSKSGTSATLGITGLQT | | | | | | |
| | | | GDEADYYCGTWDSSLSASYVFGTGTK | | | | | | |
| | | | VTVL | | | | | | |
| | CV25 | 1799 | EIVMTQSPATLSVSPGERATLSCRASQ | IGHV4-30 | IGHJ6 | IGKV3-15 | IGKJ2 | 2821 | ARDHHYDFW |
| | | | SVSSNLAWYQQKPGQAPRLLIYGAST | (Human) | (Human) | (Human) | (Human) | | SGYSSYYYYG |
| | | | RATGIPARFSGSGSGTEFTLTISSLQSE | | | | | | MDV |
| | | | DFAVYYCQQYNNWPYTFGQGTKLEIK | | | | | | |
| | CV26 | 1800 | DIQMTQSPSSLSASVGDRVTITCRASQ | IGHV3-30 | IGHJ6 | IGKV1-17 | IGKJ3 | 2822 | ARDEAYYDILT |
| | | | GIRNDLGWYQQKPGKAPKRLIYAASSL | 3 | (Human) | (Human) | (Human) | | GYINAPKNYY |
| | | | QSGVPSRFSGSGSGTEFTLTISSLQPED | (Human) | | | | | YYGMDV |
| | | | FATYYCLQHNSYPFTFGPGTKVDIK | | | | | | |
| | CV27 | 1801 | QSALTQPASVSGSPGQSITISCTGTSSD | IGHV3-30 | IGHJ6 | IGLV2-14 | IGU1 | 2823 | ARSFGGSYYY |
| | | | VGGYNYVSWYQQHPGKAPKLMIYDV | (Human) | (Human) | (Human) | (Human) | | GMDV |
| | | | SNRPSGVSNRFSGSKSGNTASLTISGL | | | | | | |
| | | | QAEDEADYYCSSYTSSSTPYVFGTGTK | | | | | | |
| | | | VTVL | | | | | | |
| | CV3 | 1802 | DIQMTQSPSSLSASVGDRVTITCRASQ | IGHV7-4- | IGHJ4 | IGKV1-39 | IGKJ3 | 2824 | ARASARPGVA |
| | | | NIDNYLNWYQQKPGKAPKLLIYAASRL | 1 | (Human) | (Human) | (Human) | | TNLDF |
| | | | HSGVPSRFSGSGSGTDFTLIISSLQPED | (Human) | | | | | |
| | | | LATYYCQQSYSNPLTFGPGTKVDIR | | | | | | |
| | CV30 | 1803 | EIVLTQSPGTLSLSPGERATLSCRASQS | IGHV3-53 | IGHJ6 | IGKV3-20 | IGKJ2 | 2825 | ARDLDVSGG |
| | | | VSSSYLAWYQQKPGQAPRLLIYGASSR | (Human) | (Human) | (Human) | (Human) | | MDV |
| | | | ATGIPDRFSGSGSGTDFTLTISRLEPED | | | | | | |
| | | | FAVYYCQQYGSSPQTFGQGTKLEIK | | | | | | |
| | CV31 | 1804 | QSVLTQPPSVSAAPGQKVTISCSGSSS | IGHV1-24 | IGHJ5 | IGLV1-51 | IGU1 | 2826 | ATAPPYSPPSS |
| | | | NIGNNYVSWYQQLPGTAPKLLIYDNN | (Human) | (Human) | (Human) | (Human) | | WFDP |
| | | | KRPSGIPDRFSGSKSGTSATLGITGLQT | | | | | | |
| | | | GDEADYYCGTWDSSLSASYVFGTGTK | | | | | | |
| | | | VTVL | | | | | | |
| | CV32 | 1805 | QSVLTQPPSVSAAPGQKVTISCSGSSS | IGHV1-2 | IGHJ4 | IGLV1-51 | IGU3 | 2827 | AREARDYYGS |
| | | | NIGNNYVSWYQQLPGTAPKLLIYDNN | (Human) | (Human) | (Human) | (Human) | | GSLDY |
| | | | KRPSGIPDRFSGSKSGTSATLGITGLQT | | | | | | |
| | | | GDEADYYCGTWDSSLSAVVFGGGTKL | | | | | | |
| | | | TVL | | | | | | |
| | CV33 | 1806 | QSVLTQPPSVSGAPGQRVTISCTGSSS | IGHV1-18 | IGHJ6 | IGLV1-40 | IGU3 | 2828 | ARDSVAGIYY |
| | | | NIGAGYDVHWYQQLPGTAPKLLIYGN | (Human) | (Human) | (Human) | (Human) | | YYGMDV |
| | | | SNRPSGVPDRFSGSKSGTSASLAITGL | | | | | | |
| | | | QAEDEADYYCQSYDSSLSGPVVFGGG | | | | | | |
| | | | TKLTVL | | | | | | |
| | CV34 | 1807 | SYELTQPHSVSVATAQMARITCGGNN | IGHV3-30 | IGHJ6 | IGLV3-12 | IGU3 | 2829 | ARSYGGSYYY |
| | | | IGSKAVHWYQQKPGQDPVLVIYSDSN | 3 | (Human) | (Human) | (Human) | | GMDV |
| | | | RPSGIPERFSGSNPGNTATLTISRIEAG | (Human) | | | | | |
| | | | DEADYYCQVWDSSSDHVVFGGGTKL | | | | | | |
| | | | TVL | | | | | | |
| | CV35 | 1808 | QSVLTQPPSASGTPGQRVTISCSGSSS | IGHV4-38 | IGHJ2 | IGLV1-44 | IGU3 | 2830 | ARTPLSLRLRY |
| | | | NIGSNTVNWYQQLPGTAPKLLIYSNN | (Human) | (Human) | (Human) | (Human) | | NWYFDL |
| | | | QRPSGVPDRFSGSKSGTSASLAISGLQ | | | | | | |
| | | | SEDEADYYCAAWDDSLNGPVFGGGT | | | | | | |
| | | | KLTVL | | | | | | |
| | CV36 | 1809 | SYELTQPPSVSVSPGQTARITCSGDALP | IGHV1-2 | IGHJ6 | IGLV3-25 | IGU1 | 2831 | ARDLTTTAGT |
| | | | KQYAYWYQQKPGQAPVLVIYKDTERP | (Human) | (Human) | (Human) | (Human) | | DYYYGMDV |
| | | | SGIPERFSGSSSGTTVTLTISGVQAEDE | | | | | | |
| | | | ADYYCQSADSSGTYMIFGTGTKVTVL | | | | | | |
| | CV37 | 1810 | DIQMTQSPSSLSASVGDRVTITCQASQ | IGHV1-18 | IGHJ4 | IGKV1-33 | IGKJ3 | 2832 | ARARVAYDYl |
| | | | DISNYLNWYQQKPGKAPKLLIYDASNL | (Human) | (Human) | (Human) | (Human) | | WGSYRYKAF |
| | | | ETGVPSRFSGSGSGTDFTFTISSLQPED | | | | | | DY |
| | | | IATYYCQQYDNLPRFGPGTKVDIKR | | | | | | |
| | CV38 | 1811 | EIVLTQSPATLSLSPGERATLSCRASQS | IGHV3-30 | IGHJ4 | IGKV3-11 | IGKJ5 | 2833 | ARAQTAHYSS |
| | | | VSSYLAWYQQKPGQAPRLLIYDASNR | (Human) | (Human) | (Human) | (Human) | | SFDY |
| | | | ATGIPARFSGSGSGTDFTLTISSLEPED | | | | | | |
| | | | FAVYYCQQRSNWPPITFGQGTRLEIK | | | | | | |
| | CV38-113 | | ND | IGHV3-53 | IGHJ4 | ND | ND | 2834 | ARGGRLADA |
| | | | | (Human) | (Human) | | | | AGDY |
| | CV38-139 | | ND | IGHV3-53 | IGHJ4 | ND | ND | 2835 | ARGHYDLFDY |
| | | | | (Human) | (Human) | | | | |
| | CV38-142 | | ND | IGHV5-51 | IGHJ4 | ND | ND | 2836 | ARIRGVYSSG |
| | | | | (Human) | (Human) | | | | WIGGDY |
| | CV38-183 | | ND | IGHV3-53 | IGHJ6 | ND | ND | 2837 | ARGDGWDN |
| | | | | (Human) | (Human) | | | | YYYGMDV |
| | CV38-221 | | ND | IGHV3-66 | IGHJ4 | ND | ND | 2838 | ARGFGDYYFD |
| | | | | (Human) | (Human) | | | | Y |
| | CV39 | 1812 | DVVMTQSPLSLPVTLGQPASISCRSSQ | IGHV3-30 | IGHJ3 | IGKV2-30 | IGKJ1 | 2839 | VRGGVSGPN |
| | | | SLVYSDGNTYVNWFQQRPGQSPRRLI | (Human) | (Human) | (Human) | (Human) | | AFDI |
| | | | YKVSNRDSGVPDRFSGSGSGTDFALKI | | | | | | |
| | | | SRVEAEDVGVYYCMQGTHWPVTFGQ | | | | | | |
| | | | GTKVEIK | | | | | | |
| | CV4 | 1813 | DIQMTQSPSTLSASVGDRVTITCRASQ | IGHV3-30 | IGHJ4 | IGKV1-5 | IGKJ2 | 2840 | ARSISGSYLGA |
| | | | SISSWLAWYQQKPGKAPKLLIYKASSL | (Human) | (Human) | (Human) | (Human) | | FDY |
| | | | ESGVPSRFSGSGSGTEFTLTISSLQPDD | | | | | | |
| | | | FATYYCQQYNSYTFGQGTKLEIK | | | | | | |
| | CV40 | 1814 | DIQMTQSPSSLSASVGDRVTITCRASQ | IGHV1-18 | IGHJ3 | IGKV1-17 | IGKJ4 | 2841 | ARVGLWWL |
| | | | GIRNDLGWYQQKPGKAPKRLIYAASSL | (Human) | (Human) | (Human) | (Human) | | GHPDAFDI |
| | | | QSGVPSRFSGSGSGTEFTLTISSLQPED | | | | | | |
| | | | FATYYCLQHNSYPLTFGGGTKVEIK | | | | | | |
| | CV41 | 1815 | EIVMTQSPATLSVSPGERATLSCRASQ | IGHV3-30 | IGHJ4 | IGKV3-15 | IGKJ4 | 2842 | ARTKGGSYFA |
| | | | SVSSNLAWYQQKPGQAPRLLIYGAST | (Human) | (Human) | (Human) | (Human) | | PFDY |
| | | | RATGIPARFSGSGSGTEFTLTISSLQSE | | | | | | |
| | | | DFAVYYCQQYNNWPLTFGGGTKVEIK | | | | | | |
| | CV42 | 1816 | DIQMTQSPSSLSASVGDRVTITCRASQ | IGHV1-18 | IGHJ4 | IGKV1-39 | IGKJ3 | 2843 | ARDRGYAATF |
| | | | SISSYLNWYQQKPGKAPKFLIYAASSLQ | (Human) | (Human) | (Human) | (Human) | | GVFDY |
| | | | SGVPSRFSGSGSGTDFTLTISSLQPEDF | | | | | | |
| | | | ATYYCQQTYITAFTFGPGTKVDIK | | | | | | |
| | CV43 | 1817 | NFMLTQPHSVSESPGKTVTISCTGSSG | IGHV3-30 | IGHJ4 | IGLV6-57 | IGU3 | 2844 | ARVTVVHFDY |
| | | | SIASNYVQWYQQRPGSAPTTVIYEDN | (Human) | (Human) | (Human) | (Human) | | |
| | | | QRPSGVPDRFSGSIDSSSNSASLTISGL | | | | | | |
| | | | KTEDEADYYCQSYDSSNWVFGGGTKL | | | | | | |
| | | | TVL | | | | | | |
| | CV44 | 1818 | SYELTQPPSVSVSPGQTARITCSGDALP | IGHV1-46 | IGHJ6 | IGLV3-25 | IGU3 | 2845 | ARDLTSTSSSP |
| | | | KQYAYWYQQKPGQAPVVVIYKDSERP | (Human) | (Human) | (Human) | (Human) | | YSYYYGMDV |
| | | | SGIPERFSGSSSGTTVTLTISGVQAEDE | | | | | | |
| | | | ADYYCQSADSSGTYVVFGGGTKLTVL | | | | | | |
| | CV45 | 1819 | QSVLTQPPSVSGAPGQRVTISCTGSSS | IGHV1-18 | IGHJ5 | IGLV1-40 | IGU1 | 2846 | ARVTVEAIFG |
| | | | NIGAGYDVHWYQQLPGTAPKLLIYGN | (Human) | (Human) | (Human) | (Human) | | VVILPLKNWF |
| | | | SNRPSGVPDRFSGSKSGTSASLAITGL | | | | | | DP |
| | | | QAEDEADYYCQSYDSSLTLYVFGTGTK | | | | | | |
| | | | VTVL | | | | | | |
| | CV46 | 1820 | DVVMTQSPLSLPVTLGQPASISCRSSQ | IGHV3-30 | IGHJ4 | IGKV2-30 | IGKJ1 | 2847 | VRGGVSGPN |
| | | | SLVYSDGNTYVNWFQQRPGQSPRRLI | (Human) | (Human) | (Human) | (Human) | | SFDM |
| | | | YQVSIRASGVPDRFSGSGSGTDFALKIS | | | | | | |
| | | | RVEAEDVGVYYCMQGTHWPVTFGQ | | | | | | |
| | | | GTKVEIK | | | | | | |
| | CV47 | 1821 | DIQMTQSPSSLSASVGDRVTITCRASQ | IGHV1-18 | IGHJ3 | IGKV1-17 | IGKJ4 | 2848 | ARVGLWWL |
| | | | GIRNDLGWYQQKPGKAPKRLIYAASSL | (Human) | (Human) | (Human) | (Human) | | GHPDVFDI |
| | | | QSGVPSRFSGSGSGTEFTLTISSLQPED | | | | | | |
| | | | FATYYCLQHNSYPLTFGGGTKVEIK | | | | | | |
| | CV48 | 1822 | DVVMTQSPLSLPVTLGQPASISCRSSQ | IGHV1-69 | IGHJ4 | IGKV2-30 | IGKJ1 | 2849 | ARDLVEDTA |
| | | | SLVYSDGNTYLNWFQQRPGQSPRRLI | (Human) | (Human) | (Human) | (Human) | | MVTGAAAGT |
| | | | YKVSNRDSGVPDKFSGSGSGTDFTLKI | | | | | | |
| | | | SRVEAEDVGVYYCMQGTHWPPTFGQ | | | | | | |
| | | | GTKVEIK | | | | | | |
| | CV5 | 1823 | DIVMTQSPDSLAVSLGERATINCKSSQ | IGHV1-46 | IGHJ3 | IGKV4-1 | IGKJ2 | 2850 | ARAGRRYSSS |
| | | | NVLYSSNNKNYLAWYQQKPGQPPKLL | (Human) | (Human) | (Human) | (Human) | | DDGAFDI |
| | | | IYWASTRESGVPDRFSGSGSGTDFTLTI | | | | | | |
| | | | SSLQAEDVAVYYCQQYYITPYTFGQGT | | | | | | |
| | | | KLEIK | | | | | | |
| | CV50 | 1824 | SYELTQPPSVSVSPGQTARITCSGDALP | IGHV3-33 | IGHJ4 | IGLV3-10 | IGU1 | 2851 | ARDIMFGDD |
| | | | KKYAYWYQQKSGQAPVLVIYEDSKRP | (Human) | (Human) | (Human) | (Human) | | WLQKQPDY |
| | | | SGIPERFSGSSSGTMATLTISGAQVED | | | | | | |
| | | | EADYYCYSTDSSGNLYVFGTGTKVTVL | | | | | | |
| | CV7 | 1825 | DIQMTQSPSTLSASVGDRVTITCRASQ | IGHV3-30 | IGHJ4 | IGKV1-5 | IGKJ2 | 2852 | ARSISGSYLGA |
| | | | SISSWLAWYQQKPGKAPKLLIYKASSL | (Human) | (Human) | (Human) | (Human) | | FDY |
| | | | ESGVPSRFSGSGSGTEFTLTISSLQPDD | | | | | | |
| | | | FATYYCQQYNSYTFGQGTKLEIK | | | | | | |
| | CV8 | 1826 | EIVLTQSPGTLSLSPGERATLSCRASQS | IGHV1-18 | IGHJ6 | IGKV3-20 | IGKJ5 | 2853 | ARLVPTWASY |
| | | | VSSSYLAWYQQKPGQAPRLLIYGASSR | (Human) | (Human) | (Human) | (Human) | | YDFWSGYPG |
| | | | ATGIPDRFSGSGSGTDFTLTISRLEPED | | | | | | GYGMDV |
| | | | FAVYYCQQYGSSPGTFGQGTRLEIK | | | | | | |
| | CV9 | 1827 | QSALTQPASVSGSPGQSITISCTGTSSD | IGHV4-39 | IGHJ2 | IGLV2-14 | IGU3 | 2854 | ATHIVVVTAT |
| | | | VGGYNYVSWYQQHPGKAPKLMIYDV | (Human) | (Human) | (Human) | (Human) | | PNWYFDL |
| | | | SNRPSGVSNRFSGSKSGNTASLTISGL | | | | | | |
| | | | QAEDEADYYCSSYTSISTWVFGGGTKL | | | | | | |
| | | | TVL | | | | | | |
| | EY6A | 1828 | DIQMTQSPSSLSASVGDRVTITCRASQ | IGHV3-30 | IGHJ4 | IGKV1-39 | IGKJ4 | 2855 | AKDGGKLWV |
| | | | SISSYLNWYQQKPGKAPKLLIYAASSLQ | 3 | (Human) | (Human) | (Human) | | YYFDY |
| | | | SGVPSRFSGSGSGTDFTLTISSLQPEDF | (Human) | | | | | |
| | | | ATYYCQQSYSTLALTFGGGTKVEIK | | | | | | |
| | Fab 2-4 | 1829 | QSALTQPPSASGSPGQSVTISCTGTSS | IGHV1-2 | IGHJ6 | IGLV2-8 | IGU3 | 2856 | ARDRSWAVV |
| | | | DVGGYNYVSWYQQHPGKAPKLMIYE | (Human) | (Human) | (Human) | (Human) | | YYYMDV |
| | | | VSKRPSGVPDRFSGSKSGNTASLTVSG | | | | | | |
| | | | LQAEDEADYYCSSYAGSNNLVFGGGT | | | | | | |
| | | | KLTVL | | | | | | |
| | FnC1t1p2_ | 1830 | EIVLTQSPGTLSLSPGERATLSCRASQS | IGHV1-8 | IGHJ4 | IGKV3-20 | IGKJ1 | 2857 | ARATTDCSST |
| | A5 | | VSSSYLAWYQQKPGQAPRLLIYGASSR | (Human) | (Human) | (Human) | (Human) | | SCWSLDFWS |
| | | | ATGIPDRFSGSGSGTDFTLTISRLEPED | | | | | | GYYTGGREKI |
| | | | FAVYYCQQYGSSPGTFGQGTKVEIK | | | | | | FD |
| | FnC1t2p1_ | 1831 | DIQMTQSPSSLSASVGDRVTITCQASQ | IGHV7-4- | IGHJ5 | IGKV1-33 | IGKJ4 | 2858 | ARSLRGANLV |
| | D4 | | DVSNYLNWYQQQPGKAPKLLIYDAFN | 1 | (Human) | (Human) | (Human) | | P |
| | | | LETGVPSRFSGSGSGTDFTFTISSLQPE | (Human) | | | | | |
| | | | DIATYYCQQYDNLPLTFGGGTKVEIK | | | | | | |
| | FnC1t2p1_ | 1832 | DIQMTQSPSSLSASVGDRVTITCQASQ | IGHV7-4- | IGHJ5 | IGKV1-33 | IGKJ4 | 2859 | ARSLRGANLV |
| | G5 | | DVSNYLNWYQQQPGKAPKLLIYDAFN | 1 | (Human) | (Human) | (Human) | | P |
| | | | LETGVPSRFSGSGSGTDFTFTISSLQPE | (Human) | | | | | |
| | | | DIATYYCQQYDNLPLTFGGGTKVEIK | | | | | | |
| | H014 | | ND | ND | ND | ND | ND | | ND |
| | H11-D4 | | N/A | IGHV3-3 | IGHJ4 | N/A | N/A | 2860 | ARTENVRSLL |
| | | | | (Alpaca) | (Alpaca) | | | | SDYATWPYDY |
| | H11-H4 | | N/A | IGHV3-3 | IGHJ4 | N/A | N/A | 2861 | AQTHYVSYLL |
| | | | | (Alpaca) | (Alpaca) | | | | SDYATWPYDY |
| | H4 | 1833 | DIQMTQSPLSLPVTPGEPASISCRSSQS | IGHV1-2 | IGHJ2 | IGKV2-40 | IGKJ4 | 2862 | ARVPYCSSTSC |
| | | | LLDSDDGNTYLDWYLQKPGQSPQLLIY | (Human) | (Human) | (Human) | (Human) | | HRDWYFDL |
| | | | TLSYRASGVPDRFSGSGSGTDFTLKISR | | | | | | |
| | | | VEAEDVGVYYCMQRIEFPLTFGGGTK | | | | | | |
| | | | VEIK | | | | | | |
| | HbnC2t1p2_ | 1834 | EIVLTQSPATLSLSPGERATLSCRASLS | IGHV3-33 | IGHJ6 | IGKV3-11 | IGKJ1 | 2863 | ARAARRPVVT |
| | D9 | | LSSYLAWYQQKPGQAPRLLIYDASNRA | (Human) | (Human) | (Human) | (Human) | | DTMAYYMDV |
| | | | TGIPARFSGSGSGTDFTLTISSLEPEDF | | | | | | |
| | | | AVYYCQQRSNWPPTWTFGQGTKAEIK | | | | | | |
| | HbnC3t1p1_ | 1835 | EIVLTQSPGTLSLSPGERATLSCRASQS | IGHV1-58 | IGHJ3 | IGKV3-20 | IGKJ1 | 2864 | AAPHCSSTICY |
| | C6 | | VSSSYLAWYQQKPGQAPRLLIYGASSR | (Human) | (Human) | (Human) | (Human) | | DGFDI |
| | | | ATGIPDRFSGSGSGTDFTLTISRVEPED | | | | | | |
| | | | FAVYYCQQYGSSPWTFGQGTKVEIK | | | | | | |
| | HbnC3t1p1_ | 1836 | DIQMTQSPSTVSASVGDRVTITCRASQ | IGHV3-30 | IGHJ5 | IGKV1-5 | IGKJ4 | 2865 | AKGGDYEWE |
| | F4 | | SIDNWLAWYQEKPGKAPKVLIYKASSL | (Human) | (Human) | (Human) | (Human) | | LLES |
| | | | ESGVPSRFSGRGSGTEFTLTISSLQPGD | | | | | | |
| | | | FATYYCQHYHSFPLTFGGGTKVDIK | | | | | | |
| | HbnC3t1p1_ | 1837 | EIVLTQSPGTLSLSPGERATLSCRASQS | IGHV3-66 | IGHJ4 | IGKV3-20 | IGKJ1 | 2866 | ARDFGDFFFD |
| | G4 | | VSSYLAWYQQKPGQAPRLLIYGVSSRA | (Human) | (Human) | (Human) | (Human) | | Y |
| | | | TGIPDRFSGSGSGTDFTLTISRLEPEDF | | | | | | |
| | | | AVYYCQQYGSSPRTFGQGTKVEIK | | | | | | |
| | HbnC3t1p2_ | 1838 | EIVLTQSPGTLSLSPGERATLSCRASQS | IGHV3-66 | IGHJ4 | IGKV3-20 | IGKJ2 | 2867 | ARDYGDYFFD |
| | B10 | | VSSYLAWYQQKPGQAPRLLISGASSRA | (Human) | (Human) | (Human) | (Human) | | Y |
| | | | AGIPDRFSGSGSGTDFTLTINRLEPEDF | | | | | | |
| | | | AVYYCQQYGSSPRTFGQGTKLEIK | | | | | | |
| | HbnC3t1p2_ | 1839 | EIVLTQSPGTLSLSPGERATLSCRASQS | IGHV1-58 | IGHJ3 | IGKV3-20 | IGKJ1 | 2868 | AAPYCSSTRC |
| | C6 | | VSSSYLAWYQQKPGQAPRLLIYGASSR | (Human) | (Human) | (Human) | (Human) | | YDAFDI |
| | | | ATGIPDRFSGSGSGTDFTLTISRLEPED | | | | | | |
| | | | FAVYYCQQYGRSPWTFGQGTKVEI | | | | | | |
| | HbnC4t1p1_ | 1840 | DIQMTQSPSSLSASVGDRATITCRASQ | IGHV3-9 | IGHJ4 | IGKV1-39 | IGKJ4 | 2869 | AKDINYDSGG |
| | D5 | | SISSYLNWYQEKPGKAPKLLIYAASSLQ | (Human) | (Human) | (Human) | (Human) | | YHKNYFDY |
| | | | SGVPSRFSGSGSGTDFTLTISSLQPEDF | | | | | | |
| | | | ATYYCQQSYSNPLTFGGGTKVEIK | | | | | | |
| | Ju et al., | | 205 | Various | Various | Various | Various | | Various |
| | 2020 | | | | | | | | |
| | Kim et | | Various | Various | Various | Various | Various | | Various |
| | al., 2020 | | | | | | | | |
| | LR1 | | N/A | IGHV3-3 | IGHJ4 | N/A | N/A | 2870 | AAAEWGYE |
| | | | | (Alpaca) | (Alpaca) | | | | WPLYYASSW |
| | | | | | | | | | Y |
| | LR11 | | N/A | IGHV3-3 | IGHJ4 | N/A | N/A | 2871 | AAAYWGWD |
| | | | | (Alpaca) | (Alpaca) | | | | WPLNSQDYW |
| | LR15 | | N/A | IGHV3-3 | IGHJ4 | N/A | N/A | 2872 | AAADWGYN |
| | | | | (Alpaca) | (Alpaca) | | | | WPLIREEYEY |
| | LR16 | | N/A | IGHV3-3 | IGHJ4 | N/A | N/A | 2873 | AAADWGYNI |
| | | | | (Alpaca) | (Alpaca) | | | | PLNITDYWY |
| | LR2 | | N/A | IGHV3-3 | IGHJ4 | N/A | N/A | 2874 | AAAMNGYNE |
| | | | | (Alpaca) | (Alpaca) | | | | PLYSYDYEY |
| | LR3 | | N/A | IGHV3-3 | IGHJ4 | N/A | N/A | 2875 | AAASWGYEW |
| | | | | (Alpaca) | (Alpaca) | | | | PLVYDDYWY |
| | LR5 | | N/A | IGHV3-3 | IGHJ4 | N/A | N/A | 2876 | AAATWGYH |
| | | | | (Alpaca) | (Alpaca) | | | | WPLGAWDY |
| | | | | | | | | | WY |
| | LR6 | | N/A | IGHV3-3 | IGHJ4 | N/A | N/A | 2877 | AAATWGYSW |
| | | | | (Alpaca) | (Alpaca) | | | | PLEHDEYWY |
| | LR7 | | N/A | IGHV3-3 | IGHJ4 | N/A | N/A | 2878 | AAAFHGEQY |
| | | | | (Alpaca) | (Alpaca) | | | | PLYTNKYHY |
| | LR8 | | N/A | IGHV3-3 | IGHJ4 | N/A | N/A | 2879 | AAANYGANF |
| | | | | (Alpaca) | (Alpaca) | | | | PLQANTYFY |
| | mAb-1 | 1841 | QPVLTQPPSVSGAPGQRITISCTGSSS | IGHV3-21 | IGHJ4 | IGLV1-40 | IGU1 | 2880 | ARDFSGHTAV |
| | | | NIGAGYDVHWYQQLPGTAPKLLIYGS | (Human) | (Human) | (Human) | (Human) | | AGTGFEY |
| | | | SSRPSGVPDRFSGSKSGTSASLAITGLQ | | | | | | |
| | | | AEDEADYYCQSYDSSLSVLYVFGTGTK | | | | | | |
| | | | VTVL | | | | | | |
| | mAb-10 | 1842 | DIVLTQTPATLSVSPGEGATLSCRASQS | IGHV3-66 | IGHJ4 | IGKV3-15 | IGKJ4 | 2881 | VRASPPGGN |
| | | | VRSNLAWFQQRPGQVPRLLIYDASTR | (Human) | (Human) | (Human) | (Human) | | TGWPFFED |
| | | | ATGVPARFTGSGSGTYFTLTISSLQSED | | | | | | |
| | | | FAVYYCQQYNSWPPLTFGGGTKLEIK | | | | | | |
| | mAb-100 | 1843 | EIVMTQSPATLSVSPGETATLSCRASQ | IGHV3-30 | IGHJ4 | IGKV3-11 | IGKJ1 | 2882 | ARDNALQNA |
| | | | SVGRFMGWYQQKPGQAPRLLIFDAS | (Human) | (Human) | (Human) | (Human) | | QIGYLDY |
| | | | NRVTGVPDRFRGSGSGTDFILTINSLEP | | | | | | |
| | | | EDSASYYCQRRGDGYNFGQGTKVEIK | | | | | | |
| | mAb-101 | 1844 | ETTLTQSPLSLPVTLGQPASISCRSSQG | IGHV1-69 | IGHJ6 | IGKV2-30 | IGKJ1 | 2883 | VLDSDPYTAT |
| | | | LVHSDGNTYLNWFQQRPGQSPRRLIY | (Human) | (Human) | (Human) | (Human) | | FSHNHYWYA |
| | | | KVSNRDSGVPDRFSGSGSGTDFTLKIS | | | | | | MDV |
| | | | RVEAEDIGVYYCMQGTEWPRTFGQG | | | | | | |
| | | | TKVEIK | | | | | | |
| | mAb-102 | 1845 | DIRVTQSPLSLPVTLGQPASISCRSSQR | IGHV1-69 | IGHJ6 | IGKV2-30 | IGKJ3 | 2884 | ARDPSIHYTG |
| | | | IVHTDGNTYLNWFLQRPGQSPRRLIYK | (Human) | (Human) | (Human) | (Human) | | NHHWYDLDI |
| | | | VSNRDSGVPDRFSGSGSGTDFTLKISR | | | | | | |
| | | | VEAEDVGIYYCMQGTEWPRTFGQGT | | | | | | |
| | | | KVDIK | | | | | | |
| | mAb-103 | 1846 | EIVMTQSPSSLSASVGDRVTITCRAGH | IGHV7-4- | IGHJ4 | IGKV1-39 | IGKJ3 | 2885 | AREEHYDFSS |
| | | | TISTYLNWYQQKPGKAPKILISGASSLQ | 1 | (Human) | (Human) | (Human) | | GYFRPAY |
| | | | SGVPSRFSGSGSGTDFTLTIGSLQPEDF | (Human) | | | | | |
| | | | ATYYCQQSYSTPYTFGQGTKVDIK | | | | | | |
| | mAb-104 | 1847 | QPVLTQPASVSGSPGQSSTLSCSGTSS | IGHV4-34 | IGHJ4 | IGLV2-23 | IGU3 | 2886 | ARGMTSPVV |
| | | | DVGSYDLVSWYQQHPGKAPKLMIYE | (Human) | (Human) | (Human) | (Human) | | HLYSSGRPSR |
| | | | GTKRPSGVSDRFSGSTSGNTASLTISGL | | | | | | WFDF |
| | | | QAEDEANYYCCSYAGSGTWIFGGGTK | | | | | | |
| | | | LTVL | | | | | | |
| | mAb-105 | 1848 | EIVLTQSPGTLSLSPGDRVTLFCRASQN | IGHV4-4 | IGHJ6 | IGKV3-20 | IGKJ1 | 2887 | ARSFISFDSSG |
| | | | IANNHLAWYQQKPGQAPRVLIYGAST | (Human) | (Human) | (Human) | (Human) | | HPYYYYAMD |
| | | | TATDIPDRFSGRVSGTDFTLTISRLDPE | | | | | | V |
| | | | DFAVYYCHQYGSSPWTFGQGTKLEIK | | | | | | |
| | mAb-106 | 1849 | ETTLTQSPATLSVSPGETATLSCRASQS | IGHV3-30 | IGHJ4 | IGKV3-11 | IGKJ1 | 2888 | ARDNALQNA |
| | | | VGRFMGWYQQKPGQAPRLLIFDASN | (Human) | (Human) | (Human) | (Human) | | QIGYLDY |
| | | | RVTGVPDRFRGSGSGTDFILTINSLEPE | | | | | | |
| | | | DSASYYCQRRGDGYNFGQGTKVEIK | | | | | | |
| | mAb-107 | 1850 | DIRMTQSPLSLPVDLGQSASISCRSSQ | IGHV1-69 | IGHJ6 | IGKV2-30 | IGKJ2 | 2889 | ARDPSILNTG |
| | | | RVVHTNGNTYLHWFHQRPGQAPRRL | (Human) | (Human) | (Human) | (Human) | | NHHWYDLD |
| | | | IYKVSNRESGVPDRFSGSGSGTDFTLRI | | | | | | M |
| | | | SRVEAEDVGVYYCMQATDWPRTFGQ | | | | | | |
| | | | GTKLEIK | | | | | | |
| | mAb-108 | 1851 | DIVMTQSPLSLSVTLGQAASISCTCSQT | IGHV1-69 | IGHJ6 | IGKV2-30 | IGKJ1 | 2890 | ARDPTFLNSG |
| | | | AVHSDGNTYLNWFHQRPGQSPRRLIY | (Human) | (Human) | (Human) | (Human) | | NHFWYDVDI |
| | | | KVSNRDSGVPDRFSGSGSGTDFTLKIN | | | | | | |
| | | | RVEAEDVGIYYCMQTTDWPRTFGQG | | | | | | |
| | | | TKVEIK | | | | | | |
| | mAb-109 | 1852 | ETTLTQSPVTLPVTLGQPASISCTSSRW | IGHV1-69 | IGHJ4 | IGKV2-30 | IGKJ2 | 2891 | ARDASFPNTG |
| | | | LVHTNGNTYLNWFHQRPGQSPRRLIY | (Human) | (Human) | (Human) | (Human) | | NHFWYDFDL |
| | | | QVSNRDSGVPDRFSGSGSGTDFTLQIS | | | | | | |
| | | | RVEAEDVGVYYCMQGTEWPRTFGQ | | | | | | |
| | | | GTKLEIK | | | | | | |
| | mAb-11 | 1853 | EIVLTQSPSSLSASVGDRVTITCQASQD | IGHV3-30 | IGHJ4 | IGKV1-33 | IGKJ5 | 2892 | AKKGSPYCGV |
| | | | IRKCLNWYQHIPGKAPKLLIHDASSLES | (Human) | (Human) | (Human) | (Human) | | DCYKGYFDY |
| | | | GVPSRFSGSGSGTDFSFTINSLHPEDIA | | | | | | |
| | | | TYYCQQFEDLPITFGQGTRLEIK | | | | | | |
| | mAb-110 | 1854 | DIVMTQSPDSLAVSLGERATINCKSSQ | IGHV3-33 | IGHJ4 | IGKV4-1 | IGKJ1 | 2893 | ARVGSGRVY |
| | | | SVLYSSNNKNYLAWYQQKPGQPPKLLI | (Human) | (Human) | (Human) | (Human) | | |
| | | | YWASTRESGVPDRFSGSGSGTDFTLTI | | | | | | |
| | | | SSLQAEDVAVYYCQQYYSTPYTFGQGT | | | | | | |
| | | | KVEIK | | | | | | |
| | mAb-111 | 1855 | DIVVTQSPGTLSLSPGERAALSCRASQS | IGHV4-4 | IGHJ3 | IGKV3-20 | IGKJ1 | 2894 | ARVRIGASHH |
| | | | VGNNYLAWYQQKPGQAPRLLIYGATS | (Human) | (Human) | (Human) | (Human) | | NFWSGYYTD |
| | | | RATGIPDRFSGSGSGTDFTLTISRLEPE | | | | | | AFDI |
| | | | DFAVYYCQQYGTSPVYTFGQGTKVEIK | | | | | | |
| | mAb-112 | 1856 | QPVLTQPPSVSAAPGQKVTISCSGSSS | IGHV5-51 | IGHJ4 | IGLV1-51 | IGU3 | 2895 | ARAPLASCSG |
| | | | NIENNYVSWYQQLPGAAPKLLIYDNN | (Human) | (Human) | (Human) | (Human) | | GRCPTYNRFD |
| | | | KRPSGIPDRFSGSKSGTSATLGITGLQT | | | | | | L |
| | | | GDEADYYCGTWDFSLSAGVFGGGTKL | | | | | | |
| | | | TVL | | | | | | |
| | mAb-113 | 1857 | ETTLTQSPLSLPVTLGQPASISCRSSQG | IGHV1-69 | IGHJ6 | IGKV2-30 | IGKJ1 | 2896 | ASEYFDGRSY |
| | | | LVHTNGNLYLNWFHQRPGQSPRRLIY | (Human) | (Human) | (Human) | (Human) | | HSFCGLDV |
| | | | QVSNRDSGVPDRFSGSGSGTDFTLRIS | | | | | | |
| | | | RVEAEDVGIYYCMQGTEWPRTFGQG | | | | | | |
| | | | TKVEIK | | | | | | |
| | mAb-114 | 1858 | DIQLTQSPSTLSASVGDSVTITCRASQS | IGHV3-23 | IGHJ6 | IGKV1-5 | IGKJ4 | 2897 | AKGLSFYGSG |
| | | | ISSWLAWYQQKPGKAPKLLIYKASSLET | (Human) | (Human) | (Human) | (Human) | | SDAFDV |
| | | | GVPSRFSGSGSGTEFTLTISSLQPDDFA | | | | | | |
| | | | TYYCQQYKSPLSFGGGTKVEIK | | | | | | |
| | mAb-115 | 1859 | DIQVTQSPATLSLSPGERATLSCRASQS | IGHV1-2 | IGHJ6 | IGKV3-11 | IGKJ5 | 2898 | ARDLISVIRGL |
| | | | VSSYLAWYQQKPGQAPRLLIYDASKR | (Human) | (Human) | (Human) | (Human) | | GGGMDV |
| | | | ATGIPARFSGSGSGTDFTLTISSLEPED | | | | | | |
| | | | FAVYYCQQRSDWHPITFGQGTRLEIK | | | | | | |
| | mAb-116 | 1860 | DIQVTQSPSSLSASVGDRVTITCRASQS | IGHV1-2 | IGHJ4 | IGKV1-39 | IGKJ3 | 2899 | ARGGPLPWS |
| | | | ISSSLNWYQQKPGKAPTLLIYTASNLQS | (Human) | (Human) | (Human) | (Human) | | DLDIVGTFDY |
| | | | GVPSRFSGSGSGTDFTLTITSLQPEDFA | | | | | | |
| | | | TYYCQQSYSTPGFGPGTKVDIK | | | | | | |
| | mAb-117 | 1861 | EIVMTQSPATLSLSPGERATLSCRASQS | IGHV3-33 | IGHJ2 | IGKV3-11 | IGKJ3 | 2900 | VKDQSSGDRL |
| | | | VSIYLAWYQQKPGQAPRLLIYDASNRA | (Human) | (Human) | (Human) | (Human) | | LYLGYFDL |
| | | | TGVPARFSGSGSGTDFTLTINNLEPED | | | | | | |
| | | | FAIYYCQQRAKWPPRVTFGPGTKVDIK | | | | | | |
| | mAb-118 | 1862 | DIVLTQSPATLSLSPGERATLSCRASQS | IGHV3-33 | IGHJ2 | IGKV3-11 | IGKJ3 | 2901 | VKDQSSGDRL |
| | | | VSIYLAWYQQKPGQAPRLLIYDASNRA | (Human) | (Human) | (Human) | (Human) | | LYLGYFDL |
| | | | TGIPARFSGSGSGTDFTLTINNLEPEDF | | | | | | |
| | | | AIYYCQQRAKWPPRVIFGPGTKVEIK | | | | | | |
| | mAb-119 | 1863 | SYELTQPPSVSVSPGQTARITCSGDALP | IGHV4-4 | IGHJ6 | IGLV3-10 | IGU3 | 2902 | ATMWGGLCT |
| | | | RRYAYWYQQRSGQAPVLVIYEDNKRP | (Human) | (Human) | (Human) | (Human) | | ASNCYGNPM |
| | | | SGIPERFSAFSSGTMATLTISGAQVEDE | | | | | | DV |
| | | | ADYYCYSTDSTANYKVFGGGTKLTVL | | | | | | |
| | mAb-12 | 1864 | ETTLTQSPLSLPVTLGQPASISCRSSQG | IGHV1-69 | IGHJ6 | IGKV2-30 | IGKJ3 | 2903 | VRDSDPYTAT |
| | | | LVHSNGNTYVNWFHQRPGQSPRRLIY | (Human) | (Human) | (Human) | (Human) | | VTSNHYWYA |
| | | | EVSNRDSGVPDRFSGSGSGTDFTLKIS | | | | | | MDV |
| | | | RVEAEDIGVYYCMQGTEWPRTFGQG | | | | | | |
| | | | TKVDIK | | | | | | |
| | mAb-120 | 1865 | QSVLIQPASVSGSPGQSITISCTGSSSD | IGHV4-34 | IGHJ5 | IGLV2-23 | IGU3 | 2904 | ARGQGGYDL |
| | | | VGSYNLVSWYQQHPGKAPKLMIYEGY | (Human) | (Human) | (Human) | (Human) | | RRVGYGLTS |
| | | | KRPSGVSNRFSGSKSGNTASLTISGLQ | | | | | | WFDP |
| | | | AEDEADYYCCSYAGSSAVVVVFGGGT | | | | | | |
| | | | KLTVL | | | | | | |
| | mAb-121 | 1866 | DIRVTQSPDSLAVSLGERATINCRTSQS | IGHV1-46 | IGHJ3 | IGKV4-1 | IGKJ3 | 2905 | ARVLAGSSHE |
| | | | VLYSSNNKNYLGWYQQKPGQPPKLLI | (Human) | (Human) | (Human) | (Human) | | WQLTHDAFD |
| | | | YWASTRESGVPDRFSGSGSGTDFTLTI | | | | | | |
| | | | SSLQAEDVAVYYCQQYYSTPYTFGQGT | | | | | | |
| | | | KVDIK | | | | | | |
| | mAb-122 | 1867 | EIVLTQSPATLSLSPGERATLSCRASQS | IGHV1-2 | IGHJ6 | IGKV3-11 | IGKJ5 | 2906 | AKDLITVIRGL |
| | | | VSTYLAWYQQKPGQAPRLLIYDASNR | (Human) | (Human) | (Human) | (Human) | | GGGMDV |
| | | | ATGIPARFSGSGSGTDFTLTISSLEPED | | | | | | |
| | | | FALYYCLQRSDWHPITFGQGTRLEIK | | | | | | |
| | mAb-123 | 1868 | DIQLTQSPATLSLSPGERATLSCRANQS | IGHV1-69 | IGHJ1 | IGKV3-11 | IGKJ4 | 2907 | ARDGPYDSG |
| | | | VSNFLAWYQQKPGQAPRHLIYDASNR | (Human) | (Human) | (Human) | (Human) | | GYHLNH |
| | | | ATGIPARFSGSGSGTDFTLTISSLEPED | | | | | | |
| | | | FAVYYCQQRSNWPPRLTFGGGTKVEIK | | | | | | |
| | mAb-124 | 1869 | DIVMTQTPGTLSVSPGERATLSCRASQ | IGHV3-11 | IGHJ4 | IGKV3-20 | IGKJ3 | 2908 | ARMGPYGSG |
| | | | IINRSQLGWYQHKPGQPPRLLIFDSSK | (Human) | (Human) | (Human) | (Human) | | TFDY |
| | | | RATGTPDRFSASGSETDFTLTISGVEPE | | | | | | |
| | | | DSGVYYCLQYSLATTFGPGTKVEIK | | | | | | |
| | mAb-125 | 1870 | QPVLTQSSSASASLGSSVKLTCTLSSGH | IGHV1-69 | IGHJ4 | IGLV4-60 | IGU6 | 2909 | ARDLSTLQPD |
| | | | SSYILAWHQQQPGKAPRFLMKFEVG | (Human) | (Human) | (Human) | (Human) | | AIVNFDY |
| | | | GRYNKGSGVPDRFSGSSSGADRYLTIS | | | | | | |
| | | | NLQSEDEADYYCETWDSNLKGVFGG | | | | | | |
| | | | GTKVTVL | | | | | | |
| | mAb-126 | 1871 | QPVLTQSSSASASLGSSVKLTCTLRSGH | IGHV1-69 | IGHJ4 | IGLV4-60 | IGU6 | 2910 | ARDLYYDNG |
| | | | SSYIIAWHQQQPGKAPRFLMKVGHSG | (Human) | (Human) | (Human) | (Human) | | GYNYLDY |
| | | | SYNKGSGVPDRFSGSRSGADHYLTISN | | | | | | |
| | | | LQPDDEADYYCEAWDNNNLGVFSGG | | | | | | |
| | | | TKVTVL | | | | | | |
| | mAb-127 | 1872 | DIQLTQSPSAMSASVGDRVTITCRASQ | IGHV3-48 | IGHJ6 | IGKV1-17 | IGKJ4 | 2911 | VRDYCNSVSC |
| | | | GINDNLAWFQQKPGKVPKRLIYAASN | (Human) | (Human) | (Human) | (Human) | | YTYYYIGMDV |
| | | | LQNGVPSRFSGSGSGTEFTLTISSLQPE | | | | | | |
| | | | DFATYYCLQHNSYPLTFGGGTKLEIK | | | | | | |
| | mAb-128 | 1873 | DIRMTQSPLSLPVTPGEPASISCRSSQS | IGHV1-18 | IGHJ6 | IGKV2-28 | IGKJ3 | 2912 | ATSASSYSRYY |
| | | | LLHSNGYNYLDWYLQKPGQSPQLLIYL | (Human) | (Human) | (Human) | (Human) | | FGLDV |
| | | | GSNRASGVPDRFSGSGSGTDFTLKISR | | | | | | |
| | | | VEAEDVGVYYCMQALQTPGVTFGGG | | | | | | |
| | | | TKVDIK | | | | | | |
| | mAb-129 | 1874 | QPVLTQPPSASGTPGQRVTISCSGSYS | IGHV4-31 | IGHJ6 | IGLV1-44 | IGU3 | 2913 | ARDLAKWSY |
| | | | NIGTNPANWYQQLPGTAPKLLIYNND | (Human) | (Human) | (Human) | (Human) | | GYYYSGMDV |
| | | | QRPSGVPDRFSGSKSGTSASLAISGLQ | | | | | | |
| | | | SEDETDYYCATWDDSLNGVVFGGGTK | | | | | | |
| | | | LTVL | | | | | | |
| | mAb-13 | 1875 | DIRMTQSPLSLPVTRGQPASISCRSSH | IGHV1-69 | IGHJ6 | IGKV2-30 | IGKJ4 | 2914 | AREEYSGTVH |
| | | | NVVHSDGKTYLNWFHQRPGQAPRRL | (Human) | (Human) | (Human) | (Human) | | NFFGMDV |
| | | | IYQVSKRDSGVPDRFSGSGSGSDFTLTI | | | | | | |
| | | | SRVEAEDVGVYYCMQGTDWPRSFGG | | | | | | |
| | | | GTKVEIK | | | | | | |
| | mAb-130 | 1876 | EIVLTQSPSSLSASVGDRVTITCRASRS | IGHV3-9 | IGHJ6 | IGKV1-39 | IGKJ1 | 2915 | AKDGRYCSGI |
| | | | ISSYLNWYQQKPGKAPNLLIYDASTLQS | (Human) | (Human) | (Human) | (Human) | | SCRTGMDV |
| | | | GVPSRFSGSGSGTDFSLTISSLQPEDFA | | | | | | |
| | | | TYYCLHTYTTPRTFGQGTKVEIK | | | | | | |
| | mAb-131 | 1877 | EIVLTQSPATLSVSPGERITLSCRASHS | IGHV3-48 | IGHJ3 | IGKV3-15 | IGKJ4 | 2916 | ARGLLDYLHD |
| | | | VSSNLAWYQQKPGQVPRLLIYGASARA | (Human) | (Human) | (Human) | (Human) | | AFDI |
| | | | TGIPARFSGSGSGTEFTLTISSLQSEDF | | | | | | |
| | | | AVYYCQQYNYWPPLTFGGGTKVEIK | | | | | | |
| | mAb-132 | 1878 | DIQMTQSPSSLSASVGDRVTITCRASQ | IGHV4-38 | IGHJ3 | IGKV1-39 | IGKJ5 | 2917 | ASRHLDLLPIG |
| | | | SISTYLNWYQQKTGKAPELLIYVASSLQ | 2 | (Human) | (Human) | (Human) | | SFDV |
| | | | SGVPSRFSGSGSGTDFTLTISSLQPEDF | (Human) | | | | | |
| | | | ATYYCQQSYRFPITFGQGTRLEIK | | | | | | |
| | mAb-133 | 1879 | EIVLTQSPATLSLSPGERATLSCRASQS | IGHV3-49 | IGHJ6 | IGKV3-11 | IGKJ3 | 2918 | TRGSGMFYG |
| | | | VGTYLAWYQQKHGQAPRLLISDVSKR | (Human) | (Human) | (Human) | (Human) | | SSSGMDV |
| | | | ATGIPARFSGSGSGTDFTLTITSLEPED | | | | | | |
| | | | FAVYYCQQRTNWPGATFGPGTKVDIK | | | | | | |
| | mAb-134 | 1880 | QPVLTQSPSASASLGGSVKLTCTLTSG | IGHV1-69 | IGHJ4 | IGLV4-69 | IGU3 | 2919 | AIRRDYSDYR |
| | | | HSTYAIAWHQQQPEKGPRFLMKLNS | (Human) | (Human) | (Human) | (Human) | | DFDY |
| | | | DGSHNKGDGIPDRFSGSSSGAERYLTI | | | | | | |
| | | | SSLQSEDEADYYCHTWGTDIQVFGGG | | | | | | |
| | | | TKLTVL | | | | | | |
| | mAb-135 | 1881 | NFMLTQPHSVSESPGKTVTISCTRSSG | IGHV4-59 | IGHJ4 | IGLV6-57 | IGU6 | 2920 | ARQSSSWYN |
| | | | SIANNYVQWLQQRPGSSPTTIIYEDNQ | (Human) | (Human) | (Human) | (Human) | | PYYFDQ |
| | | | RPSGVPDRFSGSIDASSNSASLTISGLK | | | | | | |
| | | | TEDEADYYCQSYDSSSQVFGGGTKVT | | | | | | |
| | | | VL | | | | | | |
| | mAb-136 | 1882 | DIVLTQSPATLSVSPGERITLSCRASHS | IGHV3-48 | IGHJ3 | IGKV3-15 | IGKJ4 | 2921 | ARGLLDYLHD |
| | | | VSSNLAWYQQKPGQVPRLLIYGASAR | (Human) | (Human) | (Human) | (Human) | | AFDI |
| | | | ATGIPARFSGSGSGTEFTLTISSLQSED | | | | | | |
| | | | FAVYYCQQYNYWPPLTFGGGTKVEIK | | | | | | |
| | mAb-137 | 1883 | ETTLTQSPLSLSVTLGQAASISCRPNLG | IGHV1-69 | IGHJ4 | IGKV2-30 | IGKJ2 | 2922 | ARDPSILNTG |
| | | | LMHTDGNTYLNWFHQRPGQSPRRLI | (Human) | (Human) | (Human) | (Human) | | NHHWYDLDL |
| | | | YKVSNRDSGVPDRFAGSGSGTHFTLEI | | | | | | |
| | | | SGVEADDVGVYYCMQGTEWPRTFG | | | | | | |
| | | | QGTKLEIK | | | | | | |
| | mAb-138 | 1884 | DIRMTQSPSTLSASVGDRVTITCRASQ | IGHV3-30 | IGHJ4 | IGKV1-5 | IGKJ2 | 2923 | ARPRSGSYRQ |
| | | | TIGSWLAWYQQKPGKAPNLLIYKASSL | (Human) | (Human) | (Human) | (Human) | | AIDY |
| | | | ESGVPSRFSGSGSGTEFTLTISSLQPDD | | | | | | |
| | | | FATYYCQQYNSLYTFGQGTKLEIK | | | | | | |
| | mAb-139 | 1885 | ETTLTQSPGTLSVSPGERATLSCRASQS | IGHV3-7 | IGHJ6 | IGKV3-15 | IGKJ3 | 2924 | VRQNVAIQYY |
| | | | VISNLAWYQQKPGQAPRLLIYGASTRA | (Human) | (Human) | (Human) | (Human) | | YYAMDV |
| | | | TGVPARFSGSGSGTEFTLTIASLQSEDF | | | | | | |
| | | | AVYYCQQYHHWPPYTFGQGTKVDIK | | | | | | |
| | mAb-14 | 1886 | EIVLTQSPDSLAVSLGERATINCKSSQS | IGHV3-30 | IGHJ4 | IGKV4-1 | IGKJ3 | 2925 | ARAKGGSYSN |
| | | | VLYSSNNENCLAWYQQKPGQPPKLLI | (Human) | (Human) | (Human) | (Human) | | AFDY |
| | | | YWASTRESGVPDRFSGSGSGTDFTLTI | | | | | | |
| | | | SSLQAEDVAVYYCQQYCSTPPYTFGQ | | | | | | |
| | | | GTKVDIK | | | | | | |
| | mAb-140 | 1887 | EIVMTQSPLSLPVSLGQPASISCRSSQS | IGHV1-69 | IGHJ3 | IGKV2-30 | IGKJ1 | 2926 | ARDPSILDTG |
| | | | VIHTDGNTYLNWYHQRPGQSPRRLIY | (Human) | (Human) | (Human) | (Human) | | NHHWYDLDI |
| | | | KVSNRDSGVPDRFSGSGSVTDFTLKIS | | | | | | |
| | | | RVEAEDVGVYYCMQGTEWPRTFGQ | | | | | | |
| | | | GTKVEIK | | | | | | |
| | mAb-141 | 1888 | DIVMTQSPLSLPVSRGQSASISCRSSHS | IGHV1-69 | IGHJ6 | IGKV2-30 | IGKJ3 | 2927 | AREEYSGTVH |
| | | | VVHSDGKTYVNWFHQRPGQAPRRLI | (Human) | (Human) | (Human) | (Human) | | NFFGMDV |
| | | | YQVSKRDSGVPDRFSGSGSGFDFTLKI | | | | | | |
| | | | SRVEAEDVGVYFCMQGTDWPRSFGG | | | | | | |
| | | | GTKVDIK | | | | | | |
| | mAb-142 | 1889 | DIVMTQSPSSLSASVGDRVTITCRASQ | IGHV3- | IGHJ3 | IGKV1-39 | IGKJ5 | 2928 | VRDWGSSTH |
| | | | SINIYLNWYQQKPGKAPKLLIYAASSLQ | 64D | (Human) | (Human) | (Human) | | YDVFDL |
| | | | SGVPSRFSGSGSGTDFTLTISSLQPEDF | (Human) | | | | | |
| | | | ATYYCQQSYSTPLITFGQGTRLEIK | | | | | | |
| | mAb-143 | 1890 | DIRLTQSPLSLPVTLGQAASISCKSSHF | IGHV1-69 | IGHJ3 | IGKV2-30 | IGKJ3 | 2929 | ARDPSILNTG |
| | | | IVHTDGNTYLNWFHQRPGQSPRRLIYK | (Human) | (Human) | (Human) | (Human) | | NHHWYDLDL |
| | | | VSNRDSGVPDRFSGSGSGTDFTLEISG | | | | | | |
| | | | VEAEDVGVYYCMQGTEWPRTFGQGT | | | | | | |
| | | | KVDIK | | | | | | |
| | mAb-144 | 1891 | ETTLTQSPLFLPVTLGQPASISCTSSVH | IGHV1-69 | IGHJ6 | IGKV2-30 | IGKJ3 | 2930 | ARDASIVGTG |
| | | | VVHSDGNTYLNWFQQRPGQSPRRLIY | (Human) | (Human) | (Human) | (Human) | | NHLWYGLDF |
| | | | KVSNRDSGVPDRFSGSGSGTYFTLKIS | | | | | | |
| | | | RVEAEDVGVYYCMQGTDWPRTFGQ | | | | | | |
| | | | GTKVDIK | | | | | | |
| | mAb-145 | 1892 | ETTLTQSPATLSLSPGERATLSCRASQS | IGHV3-30 | IGHJ5 | IGKV3-11 | IGKJ3 | 2931 | ARDNALQDG |
| | | | INDYLGWYQHRPGQAPRLLIHDASTRA | (Human) | (Human) | (Human) | (Human) | | RPGYFDS |
| | | | PGIPVRFSGSGSGTDFTLTISSLEPEDS | | | | | | |
| | | | AVYYCQQRFSWYNFGPGTKVEIK | | | | | | |
| | mAb-146 | 1893 | QSVLTQPASVSGSPGQSITISCAVTSSD | IGHV3-11 | IGHJ5 | IGLV2-23 | IGU3 | 2932 | ARGHRFLEFP |
| | | | VGSYNLVSWHQQHPGKAPKLMIYEV | (Human) | (Human) | (Human) | (Human) | | LNYFDP |
| | | | NKRPSGVSNRFSGSKSGNTASLTISGL | | | | | | |
| | | | QAEDEAVYYCCSYGGRSTSVVFGGGT | | | | | | |
| | | | KLTVL | | | | | | |
| | mAb-147 | 1894 | DIRLTQSPATLSLSPGERATLSCRASQS | IGHV3-30 | IGHJ5 | IGKV3-11 | IGKJ2 | 2933 | ARDNALQDG |
| | | | INDYLGWYQHRPGQAPRLLIHDASTRA | (Human) | (Human) | (Human) | (Human) | | RPGYFDS |
| | | | PGIPVRFSGSGSGTDFTLTISSLEPEDS | | | | | | |
| | | | AVYYCQQRFSWYNFGPGTKLEIK | | | | | | |
| | mAb-148 | 1895 | QPVLTQPASVSGSPGQSITISCTGTTSD | IGHV3-30 | IGHJ6 | IGLV2-14 | IGU3 | 2934 | ALLYGSGSYY |
| | | | VGGYDYVSWYQQRPGKAPKLIIYDVI | (Human) | (Human) | (Human) | (Human) | | NFVFFGWKD |
| | | | NRPSGVSNRFSGSKSGNTASLTISGLQ | | | | | | GSDA |
| | | | ADDETDYYCSSYTSGGTLVFGTGTKLT | | | | | | |
| | | | VL | | | | | | |
| | mAb-149 | 1896 | DIQMTQSPLSLPVGLGQSASISCRSSQ | IGHV1-69 | IGHJ4 | IGKV2-30 | IGKJ1 | 2935 | ARDPSILNTG |
| | | | WVVHTDGNTYLNWFHQRPGQSPRR | (Human) | (Human) | (Human) | (Human) | | NHHWYDLDL |
| | | | LIYKVSNRDSGVPDRFSGSGSGTDFTL | | | | | | |
| | | | RISRVEAEDVGVYYCMQATEWPRTFG | | | | | | |
| | | | QGTKVEIK | | | | | | |
| | mAb-15 | 1897 | DIRLTQSPLSLPVTLGQPASISCRSSQR | IGHV1-69 | IGHJ3 | IGKV2-30 | IGKJ3 | 2936 | ARDPSIHYTG |
| | | | IVHTDGNTYLNWFLQRPGQSPRRLIYK | (Human) | (Human) | (Human) | (Human) | | NHHWYDLDI |
| | | | VSNRDSGVPDRFSGSGSGTDFTLKISR | | | | | | |
| | | | VEAEDVGIYYCMQGTEWPRTFGQGT | | | | | | |
| | | | KVDIK | | | | | | |
| | mAb-150 | 1898 | DIQLTQSPLSLPVTLGQPASISCRSSQR | IGHV1-69 | IGHJ3 | IGKV2-30 | IGKJ1 | 2937 | ARDPSIHYTG |
| | | | IVHTDGNTYLNWFLQRPGQSPRRLIYK | (Human) | (Human) | (Human) | (Human) | | NHHWYDLDI |
| | | | VSNRDSGVPDRFSGSGSGTDFTLKISR | | | | | | |
| | | | VEAEDVGIYYCMQGTEWPRTFGQGT | | | | | | |
| | | | KVEIK | | | | | | |
| | mAb-151 | 1899 | ETTLTQSPLSLSVTLGQSASISCRASQT | IGHV1-69 | IGHJ6 | IGKV2-30 | IGKJ1 | 2938 | VRDSEPYTAT |
| | | | VVHSVDGNTYLNWFHQRPGQSPRRLI | (Human) | (Human) | (Human) | (Human) | | RSQNHYWYD |
| | | | YKVSNRDSGVPDRFSGSGSGTDFTLRI | | | | | | MDV |
| | | | SRVEAEDIGIYYCMQGTDWPRTFGQG | | | | | | |
| | | | TKVEIK | | | | | | |
| | mAb-152 | 1900 | DIVMTQSPLSLPVTLGQPASISCRSSQR | IGHV1-69 | IGHJ6 | IGKV2-30 | IGKJ1 | 2939 | ARDPSIHYTG |
| | | | IVHTDGNTYLNWFLQRPGQSPRRLIYK | (Human) | (Human) | (Human) | (Human) | | NHHWYDLDI |
| | | | VSNRDSGVPDRFSGSGSGTDFTLKISR | | | | | | |
| | | | VEAEDVGIYYCMQGTEWPRTFGQGT | | | | | | |
| | | | KVEIK | | | | | | |
| | mAb-153 | 1901 | DIRMTQSPLSLPVTLGQPASISCRSSQF | IGHV1-69 | IGHJ3 | IGKV2-30 | IGKJ3 | 2940 | ARDPSIVDSG |
| | | | VVHTDGNTYLNWFQQRPGQSPRRLIY | (Human) | (Human) | (Human) | (Human) | | PHHWYDLDI |
| | | | KVSNRDSGVPDRFSGSGSGTDFTLKIS | | | | | | |
| | | | RVEAEDVGVYYCMQATEWPRTFGQG | | | | | | |
| | | | TKVDIK | | | | | | |
| | mAb-154 | 1902 | SYVLTQPPSVSVSPGQTARITCSADGL | IGHV1-2 | IGHJ4 | IGLV3-25 | IGU7 | 2941 | ASGPNYFDY |
| | | | PKQYSYWYQQKPGQAPVMVIYKDTE | (Human) | (Human) | (Human) | (Human) | | |
| | | | RPSGIPERFSGSSSGTTATLTISGVQAE | | | | | | |
| | | | DEADYYCQSADSNDSSPVFGGGTQLT | | | | | | |
| | | | VL | | | | | | |
| | mAb-155 | 1903 | ETTLTQSPATLSLSPGEGATLSCRASQS | IGHV3-21 | IGHJ4 | IGKV3-11 | IGKJ1 | 2942 | ARADRDYDF |
| | | | VSSSLAWYQQKPGQAPRLLIYDASNR | (Human) | (Human) | (Human) | (Human) | | WSDPPLIDH |
| | | | ATGIPARFSGSGSGTDYTLTISSLEPED | | | | | | |
| | | | FAVYYCHQRSNWPYTFGQGTKVEIK | | | | | | |
| | mAb-156 | 1904 | DIVLTQTPSSLSASVGDRVTITCRASQT | IGHV3-53 | IGHJ4 | IGKV1-39 | IGKJ1 | 2943 | ARGFGNGWS |
| | | | IATYLSWYQQKPGKAPKLLIYAVSSLQS | (Human) | (Human) | (Human) | (Human) | | YYFDY |
| | | | GVPSRFSGSGSGTDFTLTIGSLQPEDF | | | | | | |
| | | | ATYYCQQSYSIPWTFGQGTKVDIK | | | | | | |
| | mAb-157 | 1905 | EIVMTQSPSSLSASVGDRVTITCRASQS | IGHV3-48 | IGHJ6 | IGKV1-39 | IGKJ4 | 2944 | ARDPGLEYSG |
| | | | ISYYLNWYQQKPGKAPKLLIYAASSLQS | (Human) | (Human) | (Human) | (Human) | | NYFSYYYYAM |
| | | | GVPSRFSGSGSGTDFILTISSLQPEDIA | | | | | | DV |
| | | | TYYCQHSYSSPPLTFGGGTKVEIK | | | | | | |
| | mAb-158 | 1906 | ETTLTQSPLSLPVTLGQPASISCRSSQI | IGHV1-69 | IGHJ6 | IGKV2-30 | IGKJ3 | 2945 | VRDSDPYTAT |
| | | | VVHSDGNTYLNWFHQRPGQSPRRLIYK | (Human) | (Human) | (Human) | (Human) | | SRNNHYWYD |
| | | | VSNRDSGVPDRFSGSGSGTDFTLKISR | | | | | | MDV |
| | | | VEAEDIGVYYCMQGTDWPRTFGQGT | | | | | | |
| | | | KVDIK | | | | | | |
| | mAb-159 | 1907 | DIRLTQSPLSLSVTLGQAASISCTCSQT | IGHV1-69 | IGHJ6 | IGKV2-30 | IGKJ1 | 2946 | ARDPTFLNSG |
| | | | AVHSDGNTYLNWFHQRPGQSPRRLIY | (Human) | (Human) | (Human) | (Human) | | NHFWYAVDI |
| | | | KVSNRDSGVPDRFSGSGSGTDFTLKIS | | | | | | |
| | | | RVEAEDVGIYYCMQTTDWPRTFGQG | | | | | | |
| | | | TKVEIK | | | | | | |
| | mAb-16 | 1908 | EIVLTQSPLSLPVTLGQPASISCRSSLR | IGHV1-69 | IGHJ6 | IGKV2-30 | IGKJ3 | 2947 | VRDSDPYTAT |
| | | | LVHTDGNTYLNWFQQRPGQSPRRLIYK | (Human) | (Human) | (Human) | (Human) | | YRNNHYWYA |
| | | | VSNRDSGVPDRFSGSGSGTDFTLKISR | | | | | | MDV |
| | | | VEAEDIGVYYCMQGTEWPRTFGQGT | | | | | | |
| | | | KVDIK | | | | | | |
| | mAb-160 | 1909 | DIVMTQSPGTLSLSPGERAALSCRASQ | IGHV3-11 | IGHJ4 | IGKV3-20 | IGKJ3 | 2948 | ARMGPSGSG |
| | | | IVTRSQLAWYQHKPGQPPRLLIYDSSS | (Human) | (Human) | (Human) | (Human) | | SLDY |
| | | | RATGTPDRFSGSGSGTDFTLTISRLEPE | | | | | | |
| | | | DSAVYYCHQYSGSATFGPGTKVEIK | | | | | | |
| | mAb-161 | 1910 | SYELTQPPSVSGAPRQKVTISCSGSSAN | IGHV2-5 | IGHJ4 | IGLV1-36 | IGU3 | 2949 | AHTSELPPRR |
| | | | IASNGVNWYQQLPGKAPKLLIYYDDL | (Human) | (Human) | (Human) | (Human) | | PYAAFDF |
| | | | VSSGVSDRFSGSKSGTSASLAISGLQSE | | | | | | |
| | | | DEADYYCATWDDILNGPVFGGGTKLT | | | | | | |
| | | | VL | | | | | | |
| | mAb-162 | 1911 | DIRMTQSPSSLSASVGDRVTITCRASQ | IGHV3-30 | IGHJ4 | IGKV1-27 | IGKJ1 | 2950 | ARDLPPLDY |
| | | | GFGNKVAWYQQKPGTAPKLLIYETSTL | (Human) | (Human) | (Human) | (Human) | | |
| | | | QSGVPSRFSGSGSGTEFAFTISSLQPED | | | | | | |
| | | | GATYYCQKYNRAPWTFGQGTKVEIK | | | | | | |
| | mAb-163 | 1912 | QSALIQPASVSGSPGQSITISCTGTSSD | IGHV4-34 | IGHJ4 | IGLV2-14 | IGU3 | 2951 | ARGFTFTYSD |
| | | | VGRYNYVSWYQQHPGKAPKLMIYDV | (Human) | (Human) | (Human) | (Human) | | FLTGQRTFEY |
| | | | SNRPSGVSNRFSGSKSGNTASLTISGL | | | | | | |
| | | | QAEDEAAYYCSSYISDIKLVVFGGGTKL | | | | | | |
| | | | TVL | | | | | | |
| | mAb-164 | 1913 | QSALIQPRSVSGSPGQSVTISCTGTSSD | IGHV3-30 | IGHJ4 | IGLV2-11 | IGU1 | 2952 | ARSYGGSYST |
| | | | VGGSNYVSWYQQHPGKAPKLLVYDV | (Human) | (Human) | (Human) | (Human) | | VGY |
| | | | TKRPSGVPDRFSGSKSGNTASLTISGL | | | | | | |
| | | | QAEDEADYYCCSYAGTYIFGTGTKLTV | | | | | | |
| | | | L | | | | | | |
| | mAb-165 | 1914 | QSVLTQPPSVSGSPGQSVSISCSGTSS | IGHV3-15 | IGHJ4 | IGLV2-18 | IGU1 | 2953 | SWNDVGWA |
| | | | DFGNYNRISWYQQTPGTAPKVIIYEVN | (Human) | (Human) | (Human) | (Human) | | FTF |
| | | | SRPSGVPDRFSGSKSGNTASLTITGLQ | | | | | | |
| | | | AEDEADYYCCSYRSDNTYIFGGGTKVT | | | | | | |
| | | | VL | | | | | | |
| | mAb-166 | 1915 | ETTLTQSPLFLPVTLGQPASISCRSSQR | IGHV1-69 | IGHJ6 | IGKV2-30 | IGKJ4 | 2954 | AAEERSGTNH |
| | | | LVHTNGNTYLNWFQQRPGHSPRRLIY | (Human) | (Human) | (Human) | (Human) | | NYYGLDV |
| | | | QVSNRDSGVPDRFSGSGSGTDFTLKIS | | | | | | |
| | | | RVEAEDVGVYYCMQGTEWPRTFGG | | | | | | |
| | | | GTKLEIK | | | | | | |
| | mAb-167 | 1916 | QPVLTQPPSASGTPGQRVTISCSGGSS | IGHV3-53 | IGHJ3 | IGLV1-44 | IGU1 | 2955 | ARDREMAHT |
| | | | NIGSNSVNWYQQLPGTAPKLLIYSNSQ | (Human) | (Human) | (Human) | (Human) | | ERSYGLDV |
| | | | RPSGVPDRFSGSKSGTSASLAISGLQSE | | | | | | |
| | | | DEADYYCAAWDDSLNTFRYVFGTGTK | | | | | | |
| | | | VTVL | | | | | | |
| | mAb-168 | 1917 | ETTLTQSPSSLSASVGDRVNITCRASQS | IGHV3-23 | IGHJ3 | IGKV1-39 | IGKJ3 | 2956 | AKDRYCSGGS |
| | | | ISTYLTWYQQKPGKAPKLLIYGASSLHS | (Human) | (Human) | (Human) | (Human) | | CFYDAFDI |
| | | | GVPSRFTGVGSGTEFTLSISSLQPEDFA | | | | | | |
| | | | TYYCQQSYNTFFTFGGGTKVDIK | | | | | | |
| | mAb-169 | 1918 | DIRLTQSPSSLSASVGDRVTITCRASQA | IGHV3-30 | IGHJ4 | IGKV1D-16 | IGKJ5 | 2957 | AREAQSSGRA |
| | | | IAGWLAWYQQKPGRAPKSLIYRASSL | (Human) | (Human) | (Human) | (Human) | | GCLDA |
| | | | QSGVPSRFSGSGSGTDFSLTISNLQPE | | | | | | |
| | | | DSATYYCQHYDSYPTAFGQGTRLEIK | | | | | | |
| | mAb-17 | 1919 | ETGLTQIPFSLPVTFGQPASISCRFSQR | IGHV1-69 | IGHJ3 | IGKV2-30 | IGKJ1 | 2958 | ARDPSIHYTG |
| | | | LVHTDGNTNLNWFLQRPGQFPRGLIY | (Human) | (Human) | (Human) | (Human) | | NHHWYDLDI |
| | | | KVFNRDSGVPDRFRGSGSGIDFTLKIS | | | | | | |
| | | | RVEVEDVGIYYGMQGTEWLGTFGQG | | | | | | |
| | | | TKVEIK | | | | | | |
| | mAb-170 | 1920 | ETTLTQSPLSLAVTLGQPASISCRSSLG | IGHV1-69 | IGHJ6 | IGKV2-30 | IGKJ1 | 2959 | VRDSDPYTAT |
| | | | LVHTNGNTYLNWFQQRPGQSPRRLIYR | (Human) | (Human) | (Human) | (Human) | | VRSNHYWYA |
| | | | VSNRDSGVPDRFSGSGSVTDFTLTISR | | | | | | MDV |
| | | | VEAEDIGVYYCMQGTEWPRTFGQGT | | | | | | |
| | | | KVEIK | | | | | | |
| | mAb-171 | 1921 | ETTLTQSPLSLSVTLGQAASISCTCSQT | IGHV1-69 | IGHJ6 | IGKV2-30 | IGKJ3 | 2960 | ARDPTFLNSG |
| | | | AVHSDGNTYLNWFHQRPGQSPRRLIY | (Human) | (Human) | (Human) | (Human) | | NHFWYAVDI |
| | | | KVSNRDSGVPDRFSGSGSGTDFTLKIS | | | | | | |
| | | | RVEAEDVGIYYCMQTTDWPRTFGQG | | | | | | |
| | | | TKVDIK | | | | | | |
| | mAb-172 | 1922 | EIVMTQSPASLSASVGDRVTITCRAGQ | IGHV4-39 | IGHJ5 | IGKV1-39 | IGKJ3 | 2961 | AAPAPSNHES |
| | | | SISTNLCWYQQRQGKAPKLLIYAASSL | (Human) | (Human) | (Human) | (Human) | | WSGTDWFDP |
| | | | RSGVPSRFSGSGSGTDFTLTISSLQPED | | | | | | |
| | | | FATYYCQQSYSTPPTFGGGTKVDIK | | | | | | |
| | mAb-173 | 1923 | DIQVTQSPATLSVSPGERVTLSCRASQ | IGHV1-18 | IGHJ4 | IGKV3-15 | IGKJ4 | 2962 | ARTTPRGWE |
| | | | SISNTLAWYQQKPGQAPRLLIYGASTR | (Human) | (Human) | (Human) | (Human) | | QWPVLEY |
| | | | ATGIPARFSGSGSGTEFTLTISSLQSED | | | | | | |
| | | | FAVYYCHQYNKWPPITFGGGTKVEIK | | | | | | |
| | mAb-174 | 1924 | DIQMTQSPSSLSASVGDRVTISCRASQ | IGHV3-48 | IGHJ6 | IGKV1-16 | IGKJ2 | 2963 | ARELDSETYY |
| | | | GISTFLAWFQQRPGKAPKSLIYAASKL | (Human) | (Human) | (Human) | (Human) | | NYNSLDV |
| | | | QSGVPSRFSGSDSGPDFTLTIDNLRPE | | | | | | |
| | | | DSATYYCKQYNSYPYTFGQGTKLEIK | | | | | | |
| | mAb-175 | 1925 | EIVMTQSPSSLSASVGDSVTITCRASQS | IGHV1-18 | IGHJ3 | IGKV1-39 | IGKJ1 | 2964 | ARVVFRHGQ |
| | | | ISNYLNWYQDKPGKAPELLIYAASNLQ | (Human) | (Human) | (Human) | (Human) | | YDDSSGRLAF |
| | | | SGVPSRFSGSGSGTDFTLTISSLQPEDF | | | | | | DI |
| | | | ATYYCQQSYSDSWTFGQGTKVDIK | | | | | | |
| | mAb-176 | 1926 | ETTLTQSPLSLPVTLGQPASISCRSSQR | IGHV1-69 | IGHJ3 | IGKV2-30 | IGKJ1 | 2965 | ARDPSIHYTG |
| | | | IVHTDGNTYLNWFLQRPGQSPRRLIYK | (Human) | (Human) | (Human) | (Human) | | NHHWYDLDI |
| | | | VSNRDSGVPDRFSGSGSGTDFTLKISR | | | | | | |
| | | | VEAEDVGIYYCMQGTEWPRTFGQGT | | | | | | |
| | | | KVEIK | | | | | | |
| | mAb-177 | 1927 | DIQMTQSPLSLPVTLGQPASISCRSSQS | IGHV1-69 | IGHJ6 | IGKV2-30 | IGKJ3 | 2966 | VRDSDPYTAT |
| | | | VVHSDGNTYLNWFHQRPGQSPRRLIY | (Human) | (Human) | (Human) | (Human) | | SRNNHYWYG |
| | | | KVSNRDSGVPDRFSGSGSGTDFTLKIS | | | | | | MDV |
| | | | RVEAEDIGVYYCMQGTDWPRTFGQG | | | | | | |
| | | | TKVDIK | | | | | | |
| | mAb-178 | 1928 | GIVLTQSPDSLAVSVGERATINCKSSQT | IGHV3-30 | IGHJ4 | IGKV4-1 | IGKJ3 | 2967 | AREPDGIGAA |
| | | | VLYSSKNKHYLAWYQQKPGQPPKLLT | (Human) | (Human) | (Human) | (Human) | | GISGY |
| | | | SSPSTREPGVPDRFSGSGSGTDFTLTIS | | | | | | |
| | | | SLQAEDVAVYYCQQYYTTPYTFGQGT | | | | | | |
| | | | KVDIK | | | | | | |
| | mAb-179 | 1929 | EIVMTQTPSSLSASVGDRVTITCRASQ | IGHV3-11 | IGHJ6 | IGKV1-39 | IGKJ3 | 2968 | AREMATSFGY |
| | | | SISNYVNWYQQKPGRAPNLLIYAASSL | (Human) | (Human) | (Human) | (Human) | | YFVLDV |
| | | | QSGVSSRFSGSGSGTDFTLTISSLQPED | | | | | | |
| | | | FATYYCQQTYSTPPEGPTFGPGTKVEIK | | | | | | |
| | mAb-18 | 1930 | QPVLTQPASVSGSPGQSVTISCTGTSS | IGHV4-34 | IGHJ5 | IGLV2-23 | IGU3 | 2969 | ARGQESPIVG |
| | | | DVGSYSDVGNYVSWYQHHPGKAPKL | (Human) | (Human) | (Human) | (Human) | | VTGRWFDP |
| | | | MIYEVRTRPSWVSTRFSGSKSGTTASL | | | | | | |
| | | | TISGLQAEDEADYYCCSYAGASPFVVF | | | | | | |
| | | | GGGTKLTVL | | | | | | |
| | mAb-180 | 1931 | EIVMTQSPGTLSSSPGERATLSCRASQ | IGHV3-30 | IGHJ4 | IGKV3-20 | IGKJ2 | 2970 | VRPYSGSYTN |
| | | | SVSSRYLAWYQQKPGQAPRLLIYGTSN | (Human) | (Human) | (Human) | (Human) | | WFDL |
| | | | RATGIPDRFSGSGSGTDFTLTISRLEPE | | | | | | |
| | | | DFAVYYCQQYGSSYTFGPGTKLEIK | | | | | | |
| | mAb-181 | 1932 | DIVMTQSPLSLPVGLGQSASISCRSSQ | IGHV1-69 | IGHJ3 | IGKV2-30 | IGKJ1 | 2971 | ARDPSILNTG |
| | | | RVVHTDGNTYLNWFHQRPGQSPRRLI | (Human) | (Human) | (Human) | (Human) | | NHHWYDLDI |
| | | | YKVSNRDSGVPDRFSGSGSGTDFTLRI | | | | | | |
| | | | SRVEAEDVGVYYCMQATEWPRTFGQ | | | | | | |
| | | | GTKVEIK | | | | | | |
| | mAb-182 | 1933 | DIRLTQSPLSLSVTLGQAASISCTCSQS | IGHV1-69 | IGHJ6 | IGKV2-30 | IGKJ1 | 2972 | ARDPTFLNTG |
| | | | AVHSDGTTYFNWFHQRPGQSPRRLIYK | (Human) | (Human) | (Human) | (Human) | | NHFWYAVDI |
| | | | VSNRDSGVPDRFIGSGSGTHFTLKISR | | | | | | |
| | | | VEAEDVGVYYCMQTTDWPRTFGQGT | | | | | | |
| | | | KVEIK | | | | | | |
| | mAb-183 | 1934 | ETTLTQSPLSLPVTLGQPASISCRSSQS | IGHV1-69 | IGHJ6 | IGKV2-30 | IGKJ1 | 2973 | VRDSDPYTAT |
| | | | VVHSDGNTYLNWFHQRPGQSPRRLIY | (Human) | (Human) | (Human) | (Human) | | SRNNHYWYA |
| | | | KVSNRDSGVPDRFSGSGSGTDFTLKIS | | | | | | MDV |
| | | | RVEAEDIGVYYCMQGTDWPRTFGQG | | | | | | |
| | | | TKVEIK | | | | | | |
| | mAb-184 | 1935 | ETTLTQSPLSLPVTLGQPASISCTSSQT | IGHV1-69 | IGHJ4 | IGKV2-30 | IGKJ2 | 2974 | ARDPSFLNTG |
| | | | VVHTDRNTYLNWYHQRPGQSPRRLIYK | (Human) | (Human) | (Human) | (Human) | | NHFWYDFDL |
| | | | VSNRDSGVPDRFSGSGSGSHFTLKISR | | | | | | |
| | | | VEAEDVGVYYCMQGTEWPRTFGQGT | | | | | | |
| | | | KLEIK | | | | | | |
| | mAb-185 | 1936 | QPGLTQPASVSGSPGQSITISCTGTSG | IGHV4-34 | IGHJ4 | IGLV2-23 | IGU3 | 2975 | ARGMISPRIP |
| | | | DVGSDNLVSWYQRHPGKAPKLMIYE | (Human) | (Human) | (Human) | (Human) | | RTTRQRWFD |
| | | | GSKRPSGVSHRFSGSNSGNTASLTISG | | | | | | T |
| | | | LQAEDDADYYCCSYAGDDTVVFGGGT | | | | | | |
| | | | KLTVL | | | | | | |
| | mAb-186 | 1937 | DIVLTQSPGTLSLSPGERVTLSCRASQS | IGHV4-34 | IGHJ5 | IGKV3-20 | IGKJ1 | 2976 | ARGKAHRND |
| | | | ISSNYLAWYQQKPGQAPRLLISDASSRA | (Human) | (Human) | (Human) | (Human) | | FWSGYYPHW |
| | | | TGIPDRFSGSGSGADFTLIISRLEPEDF | | | | | | FDP |
| | | | AVYFCHQYGGSPTTFGQGTKVEIK | | | | | | |
| | mAb-187 | 1938 | ETTLTQSPLSLPVTLGQPASISCRSSQI | IGHV1-69 | IGHJ6 | IGKV2-30 | IGKJ1 | 2977 | ARDSDPYTAT |
| | | | AMHSDGNTYLSWFHQRPGQPPRRLIYK | (Human) | (Human) | (Human) | (Human) | | RRHNHYWYA |
| | | | ISNRDSGVPDRFSGSGSGTDFTLKISRV | | | | | | MDV |
| | | | EAEDIGTFYCMQGTDWPRTFGQGTK | | | | | | |
| | | | VEIK | | | | | | |
| | mAb-188 | 1939 | ETTLTQSPATLSLSPGERATLSCRASQS | IGHV4-59 | IGHJ3 | IGKV3-11 | IGKJ4 | 2978 | ARGLVVRYFD |
| | | | VSSYLAWYQQKPGQAPRLLIYDAFNR | (Human) | (Human) | (Human) | (Human) | | GFPSGPIIGAF |
| | | | ATGVPARFSGSGSGTDFTLTISSLEPED | | | | | | DI |
| | | | FAVYYCQQRTSTLTFGGGTKVDIK | | | | | | |
| | mAb-189 | 1940 | ETTLTQSPLSLPVTLGQAASISCRSSQA | IGHV1-69 | IGHJ6 | IGKV2-30 | IGKJ1 | 2979 | VRDPDPYTAT |
| | | | VVHSDGNTYLNWFQQRPGQPPRRLIY | (Human) | (Human) | (Human) | (Human) | | VRHNHYWH |
| | | | KVSNRDSGVPDRFSGSGSGTVFTLKIS | | | | | | GMDV |
| | | | RVEAEDIGVYYCMQGTEWPRTFGQG | | | | | | |
| | | | TKVEIK | | | | | | |
| | mAb-19 | 1941 | QSVLTQPPSVSAAPGQKVTISCSGSSS | IGHV4-34 | IGHJ5 | IGLV1-51 | IGU3 | 2980 | ARGSLSREYD |
| | | | NLGNNYVSWYQQLPGTAPKLLIYDNH | (Human) | (Human) | (Human) | (Human) | | FLTAPQNGP |
| | | | KRPSGIPDRFSGSKSGTSATLGITGLQT | | | | | | WFDS |
| | | | GDEADYYCETWDSSLSVVVFGGGTKV | | | | | | |
| | | | TVL | | | | | | |
| | mAb-190 | 1942 | QSVLTQPPSVSATPGQKVTISCSGSSS | IGHV4-39 | IGHJ4 | IGLV1-51 | IGU3 | 2981 | ARHSQKDIVLI |
| | | | NIGNNYVSWYQQLPGTAPKLLIYDNN | (Human) | (Human) | (Human) | (Human) | | PAAQSPIFDY |
| | | | KRPSGIPDRFSGSKSGTSATLGITGLQT | | | | | | |
| | | | GDEADYYCGTWDSRLSAVVFGGGTKL | | | | | | |
| | | | TVL | | | | | | |
| | mAb-191 | 1943 | DIRVTQSPATLSLSPGERATLSCRASEN | IGHV3- | IGHJ1 | IGKV3-11 | IGKJ3 | 2982 | VKDGGYYDSS |
| | | | IAHYLAWYQQKPGQAPRLVIYDASSR | 64D | (Human) | (Human) | (Human) | | GPGH |
| | | | ATGIPGRFSGSGAGTDFTLTINSLEPED | (Human) | | | | | |
| | | | FAVYYCQQRSNWPQNFGGGTKVDIK | | | | | | |
| | mAb-192 | 1944 | DIRLTQSPSSLSASVGDRVTITCRASQD | IGHV3-30 | IGHJ5 | IGKV1D-16 | IGKJ5 | 2983 | ARESRSSGRA |
| | | | ISSWLAWYQQKSGKAPKSLIYAASSLQ | (Human) | (Human) | (Human) | (Human) | | GCFDS |
| | | | NGVPSRFSGSRSGTDFTLTISSLQPEDL | | | | | | |
| | | | GTYYCQQYDSYPVTFGQGTRLEIK | | | | | | |
| | mAb-193 | 1945 | DIVLTQTPDSLAVSLGERATINCKSSQS | IGHV3-30 | IGHJ4 | IGKV4-1 | IGKJ1 | 2984 | ARAYGGNYQ |
| | | | VLYSSNNKNYLAWYQQKPGQPPKLLI | (Human) | (Human) | (Human) | (Human) | | NHFDH |
| | | | YWASTRESGVPDRFSGSGSGTDFTLTI | | | | | | |
| | | | SSLQAEDVAVYYCQQYYTMWTFGQG | | | | | | |
| | | | TKVEIK | | | | | | |
| | mAb-194 | 1946 | QSVLTQPPSVSAAPGQKVTISCSGSSS | IGHV4-34 | IGHJ5 | IGLV1-51 | IGU1 | 2985 | ARGTISPIVGV |
| | | | NIGNDYVSWYQQLPGTAPKLLIYENYK | (Human) | (Human) | (Human) | (Human) | | PTPVVPRRGR |
| | | | RPSGIPDRFSGSKSGTSATLDITGLQTG | | | | | | SWFDP |
| | | | DEADYYCGTWDSSLSVDNYVFGTGTK | | | | | | |
| | | | LTVL | | | | | | |
| | mAb-195 | 1947 | DIVLTQSPLSLPVTLGQPASISCRSSQS | IGHV1-69 | IGHJ6 | IGKV2-30 | IGKJ3 | 2986 | VRDSDPYTAT |
| | | | VVHSDGNTYLNWFHQRPGQSPRRLIY | (Human) | (Human) | (Human) | (Human) | | SRNNHYWYA |
| | | | KVSNRDSGVPDRFSGSGSGTDFTLKIS | | | | | | MDV |
| | | | RVEAEDIGVYYCMQGTDWPRTFGQG | | | | | | |
| | | | TKVDIK | | | | | | |
| | mAb-196 | 1948 | ETTLTQSPLSLPVTLGQPASISCRSSQV | IGHV1-69 | IGHJ6 | IGKV2-30 | IGKJ3 | 2987 | VRDSDPYTAT |
| | | | LVHSDGNTYLNWFQQRPGQSPRRLIY | (Human) | (Human) | (Human) | (Human) | | SSHNHYWYA |
| | | | KVSNRDSGVPDRFSGSGSGIDFTLKISR | | | | | | MDV |
| | | | VEAEDIGVYYCMQGTEWPRTFGQGT | | | | | | |
| | | | KVDIK | | | | | | |
| | mAb-197 | 1949 | DIQLTQSPSSLSASVGDRVTITCRASQS | IGHV3-11 | IGHJ5 | IGKV1-39 | IGKJ4 | 2988 | ARDRGSGVID |
| | | | ISHYLNWYQQKPGKAPKLLIYAASNLQ | (Human) | (Human) | (Human) | (Human) | | P |
| | | | SGVPSRFSGNGSGTDFTLTISSLQPEDF | | | | | | |
| | | | ATYFCQQSYSTPLTFGGGTKVDIK | | | | | | |
| | mAb-2 | 1950 | EIVLTQSPATLSLSPGERATLSCRASEN | IGHV3- | IGHJ1 | IGKV3-11 | IGKJ4 | 2989 | VKDGGYYDSS |
| | | | IAHYLAWYQQKPGQAPRLVIYDASSRA | 64D | (Human) | (Human) | (Human) | | GPGH |
| | | | TGIPGRFSGSGAGTDFTLTINSLEPEDF | (Human) | | | | | |
| | | | AVYYCQQRSNWPQNFGGGTKVEIK | | | | | | |
| | mAb-20 | 1951 | QSVLTQPPSVSGAPGQRVTISCTGSSS | IGHV4-59 | IGHJ2 | IGLV1-40 | IGU6 | 2990 | ARVGWVRYF |
| | | | NIGAGYYVHWYQQLPGTAPKLLIYDN | (Human) | (Human) | (Human) | (Human) | | DWSKPYYYFD |
| | | | NNRPSGVPDRFSGSRSGTSASLAITGL | | | | | | L |
| | | | QAEDEGDYFCQSYDSSLSASFGGGTK | | | | | | |
| | | | VTVL | | | | | | |
| | mAb-21 | 1952 | QSVLTQPPSVSGAPGQRVTISCTGSNS | IGHV3-23 | IGHJ5 | IGLV1-40 | IGU3 | 2991 | AKCDLVRYFD |
| | | | NIGAGYDVHWYQQLPETAPKLLIYAN | (Human) | (Human) | (Human) | (Human) | | WLGEENNWF |
| | | | GNRPSGVPDRFSGSKSGTSASLAITGL | | | | | | DP |
| | | | QAEDEADYYCQSYDSSLSGVLFGGGT | | | | | | |
| | | | KLTVL | | | | | | |
| | mAb-22 | 1953 | DIQLTQSPLSLPVTLGQPASISCRSSQH | IGHV1-69 | IGHJ3 | IGKV2-30 | IGKJ1 | 2992 | VRDSDPYTAT |
| | | | LVHSDGNTYLNWFQQRPGQSPRRLIY | (Human) | (Human) | (Human) | (Human) | | VRNNHYWYA |
| | | | KVSNRDSGVPDRFSGSGSGIDFTLKISR | | | | | | LDV |
| | | | VEAEDIGVYYCMQGTEWPRTFGQGT | | | | | | |
| | | | KVEIK | | | | | | |
| | mAb-23 | 1954 | DIQVTQSPATVSVSPGEGASLSCRASQ | IGHV3-66 | IGHJ4 | IGKV3-15 | IGKJ4 | 2993 | ARATPPGGG |
| | | | SVRSNLAWFQQKPGQAPRLLISDAST | (Human) | (Human) | (Human) | (Human) | | TGWPYFDF |
| | | | RASGVPARFTGSGFGTEFTLTISSLQSE | | | | | | |
| | | | DFAIYYCQQYNTWPPLTFGGGTKVEIK | | | | | | |
| | mAb-24 | 1955 | DIRLTQSPLSLPVTLGQPASISCRSSQS | IGHV1-69 | IGHJ6 | IGKV2-30 | IGKJ4 | 2994 | AREEPSGTYH |
| | | | LVHSNGNTYLNWFQQRPGQSPRRLIYE | (Human) | (Human) | (Human) | (Human) | | NYYGLDV |
| | | | VSNRDSGVPDRFTGSGSGTDFTLKISR | | | | | | |
| | | | VEAEDVGVYYCMQGTHWPRSFGGG | | | | | | |
| | | | TKVEIK | | | | | | |
| | mAb-25 | 1956 | ETTLTQSPGTLSLSPGERATLSCRASQS | IGHV4-4 | IGHJ3 | IGKV3-20 | IGKJ1 | 2995 | AARIRGATHY |
| | | | IGSSYLAWYQQKPGQAPRLLIYGASSR | (Human) | (Human) | (Human) | (Human) | | DFWSGFWA |
| | | | ATGIPDRFSGSGSGTDFTLTISRLEPED | | | | | | GPFDI |
| | | | FAVYYCQQYGSAPLYTFGQGTKVEIK | | | | | | |
| | mAb-26 | 1957 | EIVLTQSPGTLSLSPGERASLSCRASQS | IGHV4-4 | IGHJ3 | IGKV3-20 | IGKJ3 | 2996 | ARTQSNDFW |
| | | | VSSSYLAWYQHRPGQAPRLLIYDASSR | (Human) | (Human) | (Human) | (Human) | | SGYYTAAFDL |
| | | | ATGIPDRFSGSGSGTDFTLTISRLESED | | | | | | |
| | | | FAVYYCQQYGNSPRTFGQGTKVDIK | | | | | | |
| | mAb-27 | 1958 | QPVLTQPPSVSAAPGQKVTISCSGSSS | IGHV4-34 | IGHJ5 | IGLV1-51 | IGU3 | 2997 | ARGSLSREYD |
| | | | NIGDNYVSWYQQLPGTAPKLLIYDNN | (Human) | (Human) | (Human) | (Human) | | FLTAPQNGP |
| | | | KRPSGIPDRFSGSKSGTSATLGITGLQT | | | | | | WFDS |
| | | | GDEADYYCETWDTSLSVVVFGGGTKL | | | | | | |
| | | | TVL | | | | | | |
| | mAb-28 | 1959 | DIVMTQTPLSLAVTLGQPASISCRSSH | IGHV1-69 | IGHJ6 | IGKV2-30 | IGKJ1 | 2998 | VLDTTSANPH |
| | | | GLVHTNGNTYLNWFHQRPGQPPRRL | (Human) | (Human) | (Human) | (Human) | | NWYGMDV |
| | | | IYKISNRDSGVPDRFSGSGSGTDFTLKI | | | | | | |
| | | | SRVEADDVGVYYCMQGTDWPRTFG | | | | | | |
| | | | QGTKVEIK | | | | | | |
| | mAb-29 | 1960 | EIVLTQSPGTLSLSPGERATLSCRASQT | IGHV3-11 | IGHJ4 | IGKV3-20 | IGKJ2 | 2999 | ARMGPYGSG |
| | | | VTRSQLAWYQHKPGQPPRLLIYDSSKR | (Human) | (Human) | (Human) | (Human) | | SFDY |
| | | | ATGSPDRFSASGSGTDFTLTISGLEPED | | | | | | |
| | | | TGIYYCLQYSDATTFGPGTKLEIK | | | | | | |
| | mAb-3 | 1961 | EIVMTQSPSSLSASIGDRVTISCRASQN | IGHV4-38 | IGHJ4 | IGKV1-39 | IGKJ5 | 3000 | AGRHQELLP |
| | | | IGSYLNWYQQRPGKAPNLLIFVASSLQ | 2 | (Human) | (Human) | (Human) | | MGSFDM |
| | | | SGVPSRFSGSGSGTDFTLTISSLQAEDF | (Human) | | | | | |
| | | | ATYYCQQSYTTPITFGQGTRLEIK | | | | | | |
| | mAb-30 | 1962 | DIVMTQSPLSLPVGLGQSASISCRSSQ | IGHV1-69 | IGHJ3 | IGKV2-30 | IGKJ1 | 3001 | ARDPSILNTG |
| | | | RVVHTDGNTYLNWFHQRPGQSPRRLI | (Human) | (Human) | (Human) | (Human) | | NHHWYDLDI |
| | | | YKVSNRDSGVPDRFSGSGSGTDFTLRI | | | | | | |
| | | | SRVEAEDVGVYYCMQATEWPRTFGQ | | | | | | |
| | | | GTKVEIK | | | | | | |
| | mAb-31 | 1963 | EIVLTQSPATLSLSPGERATLSCRASQS | IGHV1-69 | IGHJ4 | IGKV3-11 | IGKJ2 | 3002 | VRDGAYDSS |
| | | | VSNFLAWYQQKPGQPPRLLIYDASNR | (Human) | (Human) | (Human) | (Human) | | GYYSTQ |
| | | | ASGIAARFSGRGSGTDFTLTISSLEPED | | | | | | |
| | | | FAVYYCQQRRNWPPMYTFGQGTKLEI | | | | | | |
| | | | K | | | | | | |
| | mAb-32 | 1964 | EIVLTQSPLSLSVTLGQAASISCTCSQT | IGHV1-69 | IGHJ6 | IGKV2-30 | IGKJ2 | 3003 | ARDPTFLNSG |
| | | | AVHSDGNTYLNWFHQRPGQSPRRLIYK | (Human) | (Human) | (Human) | (Human) | | NHFWYAVDI |
| | | | VSNRDSGVPDRFSGSGSGTDFTLKISR | | | | | | |
| | | | VEAEDVGIYYCMQTTDWPRTFGQGT | | | | | | |
| | | | KLEIK | | | | | | |
| | mAb-33 | 1965 | ETTLTQSPLSLSVTLGQAASISCTCSQS | IGHV1-69 | IGHJ6 | IGKV2-30 | IGKJ3 | 3004 | ARDPTFLNTG |
| | | | AVHSDGNTYFNWFHQRPGQSPRRLIY | (Human) | (Human) | (Human) | (Human) | | NHFWYAVDI |
| | | | KVSNRDSGVPERFSGSGSGTHFTLIISR | | | | | | |
| | | | VEAEDVGVYYCMQTTDWPRTFGQGT | | | | | | |
| | | | KVDIK | | | | | | |
| | mAb-34 | 1966 | NFMLTQPHSVSESPGKAVIISCTRSSG | IGHV1-2 | IGHJ5 | IGLV6-57 | IGU3 | 3005 | ARDFGVRYD |
| | | | NIASNFVQWYQQRPGSSPTPVIYEDKL | (Human) | (Human) | (Human) | (Human) | | DSRQLMKYC |
| | | | RPSGVPDRFSGSIDRSSNSASLTISGLK | | | | | | DS |
| | | | TEDEADYYCQSYDSGNLVVFGGGTKL | | | | | | |
| | | | TVL | | | | | | |
| | mAb-35 | 1967 | DIQMTQSPLSLPVTLGQAASISCRSSQ | IGHV1-69 | IGHJ6 | IGKV2-30 | IGKJ1 | 3006 | ARDPSILNTG |
| | | | PIPHTDGNTYLNWFHQRPGQSPRRLI | (Human) | (Human) | (Human) | (Human) | | NHHWYDLDL |
| | | | HKVSNRDSGVPDRFSGSGSGLDFTLEI | | | | | | |
| | | | SGVEAEDVGIYYCMQGTEWPRTFGQ | | | | | | |
| | | | GTKVEIK | | | | | | |
| | mAb-36 | 1968 | EIVMTQTPLSLPVTLGQPASISCRSSHG | IGHV1-69 | IGHJ6 | IGKV2-30 | IGKJ3 | 3007 | VVDTTMADP |
| | | | LVHTNGNTYLNWFHQRPGQPPRRLIY | (Human) | (Human) | (Human) | (Human) | | HNWYGLDV |
| | | | QVSHRDSGVPDRFSGSGSGTDFTLKIS | | | | | | |
| | | | RVEADDVGVYYCMQGTDWPRTFGQ | | | | | | |
| | | | GTKVDIK | | | | | | |
| | mAb-37 | 1969 | ETTLTQSPGTLSLSPGERATLSCRASQS | IGHV4-4 | IGHJ3 | IGKV3-20 | IGKJ1 | 3008 | ARVRVGASH |
| | | | VGNNYLAWYQQKPGQAPRLLIYGASS | (Human) | (Human) | (Human) | (Human) | | HNFWSGYYT |
| | | | RATGIPDRFSGSGSGTDFTLTISRLEPE | | | | | | DAFDI |
| | | | DFAVYYCQQYGTSPVYTFGQGTKVEIK | | | | | | |
| | mAb-38 | 1970 | DIQLTQSPLSLPVTLGQPASISCTSSQN | IGHV1-69 | IGHJ4 | IGKV2-30 | IGKJ1 | 3009 | ARDPSFLNTG |
| | | | VVHTDGNTYLNWFHQRPGQSPRRLIY | (Human) | (Human) | (Human) | (Human) | | NHFWYDFD |
| | | | KVSNRDSGVPDRFSGSGSGSHFTLKIS | | | | | | M |
| | | | RVEAEDVGIYYCMQGTDWPRTFGQG | | | | | | |
| | | | TKVEIK | | | | | | |
| | mAb-39 | 1971 | DIVLTQTPATLSLSPGERATLSCRASQS | IGHV1-69 | IGHJ4 | IGKV3-11 | IGKJ1 | 3010 | VRDGAYDSS |
| | | | VSNFLAWYQQKPGQPPRLLIYDASNR | (Human) | (Human) | (Human) | (Human) | | GYYSTQ |
| | | | ASGIAARFSGRGSGTDFTLTISSLEPED | | | | | | |
| | | | FAVYYCQQRRNWPPMYTFGQGTKVE | | | | | | |
| | | | IK | | | | | | |
| | mAb-4 | 1972 | QSVLTQPPSVSGAPGQRVTISCTGSSS | IGHV3-21 | IGHJ4 | IGLV1-40 | IGU1 | 3011 | ARDFPGDTA |
| | | | NIGAGYDVHWYQQVPGTAPKLLIYGN | (Human) | (Human) | (Human) | (Human) | | VAGTGFNY |
| | | | SNRPSGVPDRFSGSKSGTSASLAITGL | | | | | | |
| | | | QAEDEADYYCQSYDSSLSVLYVFGTGT | | | | | | |
| | | | KVTVL | | | | | | |
| | mAb-40 | 1973 | DIRLTQSPATLSLSPGERATLSCRASQS | IGHV3-49 | IGHJ4 | IGKV3-11 | IGKJ1 | 3012 | SRDLRRGYYD |
| | | | IGYYLAWFQQKPGQAPRLLIYDASKRA | (Human) | (Human) | (Human) | (Human) | | SNGHQQFDL |
| | | | TGIPARFSGSGSGTDFTLTISSLEPEDF | | | | | | |
| | | | AVYYCQHRTNWPYTFGQGTKVEIK | | | | | | |
| | mAb-41 | 1974 | QPGLTQEPSLTVSPGGTVTLTCGSSAG | IGHV3-30 | IGHJ6 | IGLV7-46 | IGU3 | 3013 | ARDPGPITFF |
| | | | AVTSGHYPYWFQQKPGQAPRTLIYDT | (Human) | (Human) | (Human) | (Human) | | DWSPDKSRK |
| | | | NNKYSWTPARFSGSLLGGKAALTLSG | | | | | | SYYDYNGMD |
| | | | AQPEDEAEYFCFLSYRGAPPVFGGGT | | | | | | V |
| | | | HLTVL | | | | | | |
| | mAb-42 | 1975 | DIRMTQSPFSLSASVGDRVTITCRASQ | IGHV3-30 | IGHJ4 | IGKV1-27 | IGKJ1 | 3014 | ARDLPPLDY |
| | | | GFGNRLAWYQQKPGRAPKLLIYDAST | (Human) | (Human) | (Human) | (Human) | | |
| | | | LQSGVPSRFSGSGSETDFALTISSLQPE | | | | | | |
| | | | DVATYYCQKHDRDPWTFGQGTKVEIK | | | | | | |
| | mAb-43 | 1976 | DIVMTQSPLSLPVTLGQPASISCRSSQR | IGHV1-69 | IGHJ6 | IGKV2-30 | IGKJ1 | 3015 | VRDSDPYTTT |
| | | | LVHSDGNTYLNWFQQRPGQSPRRLIY | (Human) | (Human) | (Human) | (Human) | | FSHNHYWYA |
| | | | KVSNRDSGVPDRFSGSGSGTDFTLKIS | | | | | | MDV |
| | | | RVEAEDIGVYYCMQGTEWPRTFGQG | | | | | | |
| | | | TKVEIK | | | | | | |
| | mAb-44 | 1977 | ETTLTQSPASVSASVGDRVTISCRASQ | IGHV3- | IGHJ4 | IGKV1-12 | IGKJ4 | 3016 | VKDNVILPGA |
| | | | GIGRWLAWYQQKPGRAPKLLIFSASSL | 64D | (Human) | (Human) | (Human) | | IVRPQFDY |
| | | | QSGVPSRFSGSGSGTDFTLTISSLQPED | (Human) | | | | | |
| | | | FATYYCQQAESFPFTFGGGTKVEIK | | | | | | |
| | mAb-45 | 1978 | ETTLTQSPLSLPVDLGQSASISCRSSQR | IGHV1-69 | IGHJ6 | IGKV2-30 | IGKJ1 | 3017 | ARDPSILNTG |
| | | | VVHTNGNTYLHWFHQRPGQAPRRLI | (Human) | (Human) | (Human) | (Human) | | NHHWYDLD |
| | | | YKVSNRESGVPDRFSGSGSGTDFTLRI | | | | | | M |
| | | | SRVEAEDVGVYYCMQATDWPRTFGQ | | | | | | |
| | | | GTKVEIK | | | | | | |
| | mAb-46 | 1979 | CIRLTQSPATLSLSPGERATLSCRASQS | IGHV3-30 | IGHJ4 | IGKV3-11 | IGKJ3 | 3018 | ARDNVVQQN |
| | | | VTSYLAWYQQRPGQAPRLLIYDTSNR | (Human) | (Human) | (Human) | (Human) | | ADNVGYFDF |
| | | | VTGVPVRFSGSGYGTDFTLTISSLEPED | | | | | | |
| | | | FAVYYCQQRGNGYTFGPGTKVEIK | | | | | | |
| | mAb-47 | 1980 | ETTLTQSPLSLPVGLGQSASISCRSSQR | IGHV1-69 | IGHJ6 | IGKV2-30 | IGKJ3 | 3019 | ARDPSILNTG |
| | | | VVHTDGNTYLNWFHQRPGQSPRRLIY | (Human) | (Human) | (Human) | (Human) | | NHHWYDLDL |
| | | | KVSNRDSGVPDRFSGSGSGTDFTLRIS | | | | | | |
| | | | RVEAEDVGVYYCMQATEWPRTFGQG | | | | | | |
| | | | TKVDIK | | | | | | |
| | mAb-48 | 1981 | EIVMTQSPLSLPVTLGQPASISCRSSQS | IGHV1-69 | IGHJ6 | IGKV2-30 | IGKJ2 | 3020 | VRDSDPYTAT |
| | | | VVHSDGNTYLNWFHQRPGQSPRRLIY | (Human) | (Human) | (Human) | (Human) | | SRNNHYWYG |
| | | | KVSNRDSGVPDRFSGSGSGTDFTLKIS | | | | | | MDV |
| | | | RVEAEDIGVYYCMQGTDWPRTFGQG | | | | | | |
| | | | TKLEIK | | | | | | |
| | mAb-49 | 1982 | DIVMTQSPLSLPVDLGQSASISCRSSQT | IGHV1-69 | IGHJ3 | IGKV2-30 | IGKJ2 | 3021 | ARDPSILNTG |
| | | | AVHTNGNTYLHWFHQRPGQAPRRLI | (Human) | (Human) | (Human) | (Human) | | NHHWYDLD |
| | | | YKVSNRESGVPDRFSGSGSGTDFTLRI | | | | | | M |
| | | | NRVEAEDVGVYYCMQATDWPRTFG | | | | | | |
| | | | QGTKLEIK | | | | | | |
| | mAb-5 | 1983 | DIVLTQTPSSLSASVGDRVTITCRASQT | IGHV3-49 | IGHJ6 | IGKV1-39 | IGKJ3 | 3022 | AREGTSLGYY |
| | | | ISYYLNWYQQKVGKAPQLLVYAASSLQ | (Human) | (Human) | (Human) | (Human) | | YYYAMDV |
| | | | SGVPSRFSGSGSGTDFTLTISSLQPEDF | | | | | | |
| | | | ATYYCQQSYSVPLTLGQGTKVDIK | | | | | | |
| | mAb-50 | 1984 | DIQMTQSPLSLPVDLGQSASISCRSSQ | IGHV1-69 | IGHJ6 | IGKV2-30 | IGKJ1 | 3023 | ARDPSILNTG |
| | | | RVVHTNGNTYLHWFHQRPGQAPRRL | (Human) | (Human) | (Human) | (Human) | | NHHWYDLD |
| | | | YKVSNRESGVPDRFSGSGSGTDFTLRI | | | | | | M |
| | | | SRVEAEDVGVYYCMQATDWPRTFGQ | | | | | | |
| | | | GTKVEIK | | | | | | |
| | mAb-51 | 1985 | QPGLTQPASVSGSPGQSITISCTRTSG | IGHV3-7 | IGHJ3 | IGLV2-14 | IGU3 | 3024 | ARGPIRHFGL |
| | | | DVGDYNSVSWYVSWYQQHPGRAPKL | (Human) | (Human) | (Human) | (Human) | | DAFDI |
| | | | MLYDVSNRPSGVSNRFSGSKLGDTAS | | | | | | |
| | | | LTISELQAEDEADYYCSTYTSTSTIFGG | | | | | | |
| | | | GTKLTVL | | | | | | |
| | mAb-52 | 1986 | DIQMTQSPLSLPVTLGQPASISCRASQ | IGHV1-69 | IGHJ6 | IGKV2-30 | IGKJ3 | 3025 | VRDSDPYTAT |
| | | | TVVHTNGNTYLNWFHQRPGQSPRRLI | (Human) | (Human) | (Human) | (Human) | | SRNNHYWYG |
| | | | YEVSNRDSGVPDRFSGSGSGTDFTLSI | | | | | | MDV |
| | | | SRVEAEDIGVYYCMQGTDWPRTFGP | | | | | | |
| | | | GTKVEIK | | | | | | |
| | mAb-53 | 1987 | DIRLTQSPLSLPVDLGQSASISCRSSQT | IGHV1-69 | IGHJ3 | IGKV2-30 | IGKJ3 | 3026 | ARDPSILNTG |
| | | | VVHTNGNTYLHWFHQRPGQAPRRLI | (Human) | (Human) | (Human) | (Human) | | NHHWYDLD |
| | | | YKVSNRESGVPDRFSGSGSGTDFTLRI | | | | | | M |
| | | | SRVEAEDVGVYYCMQATDWPRTFGQ | | | | | | |
| | | | GTKVDIK | | | | | | |
| | mAb-54 | 1988 | DIRVTQSPSSLSATVGDRVTITCRASQT | IGHV3- | IGHJ3 | IGKV1-39 | IGKJ5 | 3027 | VKDLGATVTY |
| | | | ITKYLNWYQQKPGKAPKLLLYGASSLQ | 64D | (Human) | (Human) | (Human) | | DVFDV |
| | | | SGVPSRFSGSGSGTDFTLTISSLQPEDF | (Human) | | | | | |
| | | | ATYYCQQTYITPGTFGQGTRLEIK | | | | | | |
| | mAb-55 | 1989 | DIRLTQSPDSLALSLGERATINCKSSQS | IGHV3-23 | IGHJ4 | IGKV4-1 | IGKJ1 | 3028 | AKERDLPGRG |
| | | | VLFSSNNNNYLGWYQQKPGQPPKLLI | (Human) | (Human) | (Human) | (Human) | | GYFDH |
| | | | YWASTRESGVPDRFSGSGSGTDFTLTI | | | | | | |
| | | | SSLQAEDVAVYYCQQYYLTPWTFGQG | | | | | | |
| | | | TKVDIK | | | | | | |
| | mAb-56 | 1990 | QPVLTQPASVSGSPGQSITISCTGTSSD | IGHV4-34 | IGHJ5 | IGLV2-23 | IGU3 | 3029 | ARGYTAPIIRE |
| | | | VGNYNVVSWYQQHPGKAPQLFIYED | (Human) | (Human) | (Human) | (Human) | | VPITFRPRWF |
| | | | TKRPSGVSDRFSGSKSGITASLTISRLQ | | | | | | DP |
| | | | PEDEADYYCCSYAVSGTVLFGGGTKVT | | | | | | |
| | | | VL | | | | | | |
| | mAb-57 | 1991 | EIVLTQSPGTLSVSPGERATLSCRASQI | IGHV3-11 | IGHJ4 | IGKV3-20 | IGKJ3 | 3030 | ARMGPYGSG |
| | | | INRSQLGWYQHKPGQAPRLLIFDSSKR | (Human) | (Human) | (Human) | (Human) | | TFDY |
| | | | ATGTPDRFSASGSETDFTLTISGVEPED | | | | | | |
| | | | SGVYYCLQYSLATTFGPGTKVDIK | | | | | | |
| | mAb-58 | 1992 | DIQLTQSPATLSLSPGERATLSCRASPS | IGHV3-30 | IGHJ5 | IGKV3-11 | IGKJ3 | 3031 | ARDHALQNG |
| | | | VFTFLAWYQQRPGQPPRLLIHDVSNR | (Human) | (Human) | (Human) | (Human) | | RPGYFDS |
| | | | APGIPARFSGSGSGTDFTLIISSLEPDD | | | | | | |
| | | | SAVYFCQQRSDGYNFGPGTKVDIK | | | | | | |
| | mAb-59 | 1993 | DIRVTQSPSSLSASVGDRVTITCRASQT | IGHV3-64 | IGHJ4 | IGKV1-39 | IGKJ1 | 3032 | VREGQQWLG |
| | | | INNYLNWYQQKPGKAPNLLIYAASTLQ | (Human) | (Human) | (Human) | (Human) | | LYFDH |
| | | | NGVPSRFSGSGSGTDFTLTISSVQPED | | | | | | |
| | | | FATYYCQQTYITPTWTFGQGTKVEIK | | | | | | |
| | mAb-6 | 1994 | EIVMTQSPSSLSASVGDRVTITCRASQS | IGHV1-8 | IGHJ4 | IGKV1-39 | IGKJ3 | 3033 | AREKKSFGPQ |
| | | | ISNYLYWYQQKPGKAPKLLIYVASNLQ | (Human) | (Human) | (Human) | (Human) | | YYYGSGED |
| | | | SGVPSRFSGSGSGTDFTLTISSLQPEDF | | | | | | |
| | | | ATYYCQQSYSTPYNFGQGTKVDIK | | | | | | |
| | mAb-60 | 1995 | EIVLTQSPSTLSASVGDRVTITCRASQN | IGHV5-51 | IGHJ3 | IGKV1-5 | IGKJ3 | 3034 | VRQRYCSGGS |
| | | | VNNWLAWYQQKPGKAPKLLIYEASTL | (Human) | (Human) | (Human) | (Human) | | CFLFEDAFEI |
| | | | KSGVPSRFSGSGSGTEFTLTISSLQPDD | | | | | | |
| | | | FATYYCQQYNSQYTFGQGTKVDIK | | | | | | |
| | mAb-61 | 1996 | QPVLTQPRSVSGSPGQSVTISCTGSSST | IGHV3-48 | IGHJ5 | IGLV2-11 | IGU3 | 3035 | VRDTDWAFD |
| | | | FGTDNHISWYQQLPGKVPKLIIHAVSQ | (Human) | (Human) | (Human) | (Human) | | s |
| | | | RPSVVPDRFSGSRSGNTASLTISGLQA | | | | | | |
| | | | EDEADYYCCSSPGTITWVFGGGTKVT | | | | | | |
| | | | VL | | | | | | |
| | mAb-62 | 1997 | QSVLTQPPSVSGVPRQKVTISCSGSTA | IGHV2-5 | IGHJ4 | IGLV1-36 | IGU3 | 3036 | AHTSELPPRR |
| | | | NIASNGVNWYQLVPGKAPRLLISYDDL | (Human) | (Human) | (Human) | (Human) | | PYAAFDF |
| | | | VPSGVSARFSGSKSGTSASLAISGLQAE | | | | | | |
| | | | DEADYYCATWDDILNGPVFGGGTKLT | | | | | | |
| | | | VL | | | | | | |
| | mAb-63 | 1998 | DIVLTQSPLSLPVTLGQSASISCRSSQG | IGHV3-23 | IGHJ4 | IGKV2-30 | IGKJ2 | 3037 | ANTNFLDY |
| | | | LVHSDGNIYLNWFQQRPGQSPRRLIY | (Human) | (Human) | (Human) | (Human) | | |
| | | | KVSNRDSGVPDRFSGSGSGTDFTLKIS | | | | | | |
| | | | RVEAEDVGLYYCMQATHWPRAFGQ | | | | | | |
| | | | GTKLEIK | | | | | | |
| | mAb-64 | 1999 | EIVMTQSPGTLSLSPGERVTLSCRATQ | IGHV4-4 | IGHJ6 | IGKV3-20 | IGKJ1 | 3038 | TRSFISFDSSG |
| | | | SVSNNHLAWYQQKPGQAPRLLIYGAS | (Human) | (Human) | (Human) | (Human) | | HPYYYYAMD |
| | | | TTATDIPDRFSGRVAGTDFTLTISRLDP | | | | | | V |
| | | | EDFAVYYCHQYGSSPWTFGQGTKVEI | | | | | | |
| | | | K | | | | | | |
| | mAb-65 | 2000 | DIRLTQSPATLSLSPGERATLSCRASQS | IGHV1-69 | IGHJ4 | IGKV3-11 | IGKJ1 | 3039 | TRETGTDEFD |
| | | | VSSSLAWYQQKPGQAPRLLIYEASNRA | (Human) | (Human) | (Human) | (Human) | | F |
| | | | TGVPARFSGSGSGTDFTLAISSLEPEDF | | | | | | |
| | | | AVYYCQHRSNWPPRYTFGQGTKVEIK | | | | | | |
| | mAb-66 | 2001 | SYELTQPPSVSVSPGQTARITCSGDALP | IGHV4-4 | IGHJ6 | IGLV3-10 | IGU6 | 3040 | ATMWGGLCT |
| | | | RRYAYWYQQRSGQAPVLVIYEDNKRP | (Human) | (Human) | (Human) | (Human) | | ASNCYGNPM |
| | | | SGIPERFSAFSSGTRATLTISGAQVEDE | | | | | | DV |
| | | | ADYYCYSTDSTANYKVFGGGTKVTVL | | | | | | |
| | mAb-67 | 2002 | SYELTQPPSVSVSPGQTARITCSGDALP | IGHV4-4 | IGHJ6 | IGLV3-10 | IGU3 | 3041 | ATMWGGLCT |
| | | | RRYAYWYQQRSGQAPVLVIYEDNKRP | (Human) | (Human) | (Human) | (Human) | | ASNCYGNPM |
| | | | SGIPERFSAFSSGTRATLTISGAQVEDE | | | | | | DV |
| | | | ADYYCYSTDSTANYKVFGGGTKLTVL | | | | | | |
| | mAb-68 | 2003 | SYELTQPPSVSVSPGQTARITCSGDALP | IGHV4-4 | IGHJ6 | IGLV3-10 | IGU3 | 3042 | ATMWGGLCT |
| | | | RRYAYWYQQRSGQAPVLVIYEDNKRP | (Human) | (Human) | (Human) | (Human) | | ASNCYGNPM |
| | | | SGIPERFSAFSSGTRATLTISGAQVEDE | | | | | | DV |
| | | | ADYYCYSTDSTANYKVFGGGTKLTVL | | | | | | |
| | mAb-69 | 2004 | QSVLTQPSSLSASPGASASLTCTLHSGF | IGHV3-74 | IGHJ4 | IGLV5-45 | IGU3 | 3043 | ARDLAWTFF |
| | | | NVGDHTINWYQQRPGSPPRYLLKYKS | (Human) | (Human) | (Human) | (Human) | | DY |
| | | | DSDKEQGSGVPIRFSGSKDASANAGFL | | | | | | |
| | | | LISGLRSEDEADYYCMIWHDNAVVFG | | | | | | |
| | | | GGTKLTVL | | | | | | |
| | mAb-7 | 2005 | EIVLTQSPATLSVSPGDGASLSCRASQS | IGHV3-66 | IGHJ4 | IGKV3-15 | IGKJ4 | 3044 | ARATPPGGTT |
| | | | VGSNLAWYQQKPGQAPRLLISDASAR | (Human) | (Human) | (Human) | (Human) | | GWPYIDL |
| | | | ATGVPARFTGSGSGTDFTLTISSLQSED | | | | | | |
| | | | FAVYYCHQYNTWPPLTFGGGTKLEIK | | | | | | |
| | mAb-70 | 2006 | EIVMTQSPLSLPVTLGQSASISCRSSQG | IGHV3-23 | IGHJ4 | IGKV2-30 | IGKJ3 | 3045 | ANTNFLDY |
| | | | LVHSDGNIYLNWFQQRPGQSPRRLIY | (Human) | (Human) | (Human) | (Human) | | |
| | | | KVSNRDSGVPDRFSGSGSGTDFTLKIS | | | | | | |
| | | | RVEAEDVGLYYCMQATHWPRAFGQ | | | | | | |
| | | | GTKVDIK | | | | | | |
| | mAb-71 | 2007 | DIVMTQSPLALSVTPGQPASISCKSSQ | IGHV3-9 | IGHJ6 | IGKV2D-29 | IGKJ5 | 3046 | AKLGTDHPIG |
| | | | SLLHSDGKTYFYWYLQKPGQSPHLLIY | (Human) | (Human) | (Human) | (Human) | | VDV |
| | | | EVSNRFSGVPDRFSGSGSGTDFTLKISR | | | | | | |
| | | | VEAEDVGVYYCMQSIQVPITFGGGTK | | | | | | |
| | | | LEIK | | | | | | |
| | mAb-72 | 2008 | DIVMTQSPATLSVSPGERATLSCRASQ | IGHV3- | IGHJ4 | IGKV3-15 | IGKJ3 | 3047 | VKALYSSSWC |
| | | | SVSSNLAWYQQKPGQAPRLLIYGAST | 64D | (Human) | (Human) | (Human) | | PFDY |
| | | | RATNIPARFSGSGSGTEFTLTISSLQSE | (Human) | | | | | |
| | | | DFAVYYCQQYNLWPYTFGQGTKVDIK | | | | | | |
| | mAb-73 | 2009 | EIVLTQSPSSLSASVGDRVTISCRASQG | IGHV3-48 | IGHJ6 | IGKV1-16 | IGKJ2 | 3048 | ARELDSETYY |
| | | | ISTFLAWFQQRPGKAPKSLIYAASKLQS | (Human) | (Human) | (Human) | (Human) | | NYNSLDV |
| | | | GVPSRFSGSDSGPDFTLTIDNLQPEDS | | | | | | |
| | | | ATYYCKQYNSYPYTFGQGTKLEIK | | | | | | |
| | mAb-74 | 2010 | QSVVTQPPSVSAAPGQKVTISCSGSSS | IGHV4-59 | IGHJ5 | IGLV1-51 | IGU3 | 3049 | AKAQGIYYRG |
| | | | NIGNNYVSWYQQLPGTAPKLLIYDSD | (Human) | (Human) | (Human) | (Human) | | WSYWFDP |
| | | | KRPSGIPERFSGSKSATSATLGITGLQT | | | | | | |
| | | | GDEADYYCETWDDSLSAVVFGGGTKL | | | | | | |
| | | | TVL | | | | | | |
| | mAb-75 | 2011 | DIVLTQSPLSLSVTPGQPASISCRSSQS | IGHV1-46 | IGHJ5 | IGKV2D-29 | IGKJ5 | 3050 | AREARRQVT |
| | | | LQHTDGKTYLYWYLQKPGQSPQLLIYEL | (Human) | (Human) | (Human) | (Human) | | QWFGEFWG |
| | | | FNRFSGVPERFSGSGSGTDFTLKISRVE | | | | | | PYNWFDP |
| | | | AEDVGIYYCMQSIQTPITFGQGTRLEIK | | | | | | |
| | mAb-76 | 2012 | DIRVTQSPDSLAVSLGERATINCKSSQS | IGHV4-34 | IGHJ4 | IGKV4-1 | IGKJ4 | 3051 | ARGLISYTLW |
| | | | VLYSSNNKNYLAWYQQKIGQPPKLLIY | (Human) | (Human) | (Human) | (Human) | | LRESYFDY |
| | | | WASIRESGVPDRFTGSGSGTDFTLTISS | | | | | | |
| | | | LQAEDVAVYYCQQYYSTPPTFGGGTK | | | | | | |
| | | | LEIK | | | | | | |
| | mAb-77 | 2013 | EIVMTQTPLSLPVTLGQPASISCRSSQF | IGHV1-69 | IGHJ6 | IGKV2-30 | IGKJ1 | 3052 | ARDPSILNTG |
| | | | VSHTDGNTYLNWFQQRPGQSPRRLIY | (Human) | (Human) | (Human) | (Human) | | NHHWYDLDI |
| | | | KVSKRDSGVPDRFSGSGSGTDFTLTIS | | | | | | |
| | | | RVEAEDVGVYYCMQATEWPRTFGQG | | | | | | |
| | | | TKVEYQ | | | | | | |
| | mAb-78 | 2014 | DIVMTQSPDSLAVSLGERATINCKSSQ | IGHV1-18 | IGHJ4 | IGKV4-1 | IGKJ3 | 3053 | ARDYGDGPP |
| | | | SVLFSSNNKNYLAWYQQKPGLPPKLLI | (Human) | (Human) | (Human) | (Human) | | DH |
| | | | YWASTRKSGVSDRFSGSGSGTDFTLTI | | | | | | |
| | | | SSLQAEDVAVYYCQQYYTTPLFTFGPG | | | | | | |
| | | | TKVDIK | | | | | | |
| | mAb-79 | 2015 | DIVMTQSPLSLPVTLGQPASISCRSSHS | IGHV1-69 | IGHJ6 | IGKV2-30 | IGKJ3 | 3054 | VLDTTMSHP |
| | | | LVHTNGNTYLNWFQQRPGQPPRRLIY | (Human) | (Human) | (Human) | (Human) | | HNWYGMDV |
| | | | QVSNRDSGVPDRFSGSGSGTDFTLKIS | | | | | | |
| | | | RVEADDVGIYYCMQGTDWPRTFGQG | | | | | | |
| | | | TKVDIK | | | | | | |
| | mAb-8 | 2016 | ETTLTQSPLSLPVTLGQPASISCRSSQG | IGHV1-69 | IGHJ4 | IGKV2-30 | IGKJ1 | 3055 | ASEYFDGRSY |
| | | | LAHSNGNTYLNWFHQRPGQSPRRLIY | (Human) | (Human) | (Human) | (Human) | | HSFCGLDV |
| | | | QVSNRDSGVPDRFSGSGSGTDFTLKIS | | | | | | |
| | | | RVEAEDVGVYYCMQGTEWPRTFGQ | | | | | | |
| | | | GTKVEIK | | | | | | |
| | mAb-80 | 2017 | DIVMTQSPLSLPVSLGQPASISCRSSQS | IGHV1-69 | IGHJ6 | IGKV2-30 | IGKJ3 | 3056 | ARDPSILNTG |
| | | | VVHTDGNTYLNWYQQRPGQSPRRLIY | (Human) | (Human) | (Human) | (Human) | | PHHWYDLDI |
| | | | KVSNRDSGVPDRFSGSGSVTDFTLKIS | | | | | | |
| | | | RVEAEDVAVYYCMQGTEWPRTFGQG | | | | | | |
| | | | TKVDIK | | | | | | |
| | mAb-81 | 2018 | DIQMTQSPLSLSVTLGQSASISCRASQT | IGHV1-69 | IGHJ6 | IGKV2-30 | IGKJ1 | 3057 | VRDSEPYTAT |
| | | | VVHSVDGNTYLNWFHQRPGQSPRRLL | (Human) | (Human) | (Human) | (Human) | | RSQNHYWYD |
| | | | YKVSNRDSGVPDRFSGSGSGTDFTLRI | | | | | | MDV |
| | | | SRVEAEDIGIYYCMQGTDWPRTFGQG | | | | | | |
| | | | TKVEIK | | | | | | |
| | mAb-82 | 2019 | QPVLTQPASVSGSPGQSITISCTGTSSD | IGHV4-4 | IGHJ6 | IGLV2-14 | IGU1 | 3058 | AREFGVRFLD |
| | | | VGSFNYVSWYQQHPGKAPKLVIYDVY | (Human) | (Human) | (Human) | (Human) | | RSLFGAMDV |
| | | | NRPSGVSNRFSGSKSGNTASLTISGLQ | | | | | | |
| | | | AEDEADYYCSSYTSSSTLYVFGTGTKVT | | | | | | |
| | | | VL | | | | | | |
| | mAb-83 | 2020 | DIRLTQSPSTLSASVGDRVTITCRASQS | IGHV3-30 | IGHJ3 | IGKV1-5 | IGKJ1 | 3059 | ARAGGYLSAF |
| | | | ISSWLAWYQQKPGKAPNLLIYKASTLES | (Human) | (Human) | (Human) | (Human) | | DI |
| | | | GVPSRFSGSGSGTEFTLTISSLQPDDFA | | | | | | |
| | | | TYYCQQYNSGWTFGQGTKVEIK | | | | | | |
| | mAb-84 | 2021 | DIRLTQSPLSLPVTLGQPASISCTSSQD | IGHV1-69 | IGHJ3 | IGKV2-30 | IGKJ3 | 3060 | ARDPSFLNAG |
| | | | VVHTDGNTYLNWFHQRPGQSPRRLIY | (Human) | (Human) | (Human) | (Human) | | NHFYYDFDV |
| | | | KVSNRDSGVPDRFSGSGSGSHFTLKIS | | | | | | |
| | | | RVEAEDAGIYYCMQGTDWPRTFGQG | | | | | | |
| | | | TKVDIK | | | | | | |
| | mAb-85 | 2022 | EIVLTQSPSSLSASVGDRVTITCRASQD | IGHV4-4 | IGHJ4 | IGKV1-9 | IGKJ3 | 3061 | ARAGNIVVM |
| | | | ISNYLAWYQQKPGKAPKLLIYAASTLQS | (Human) | (Human) | (Human) | (Human) | | PAAQYYFDY |
| | | | GVPLRFSGSGSGTDFTLTISSLQPEDFA | | | | | | |
| | | | TYYCLQLHNYSSFGGGTKVDIK | | | | | | |
| | mAb-86 | 2023 | EIVLTQSPATLSLSPGERATLSCRASQS | IGHV3-30 | IGHJ5 | IGKV3-11 | IGKJ2 | 3062 | VRDDVLQHS |
| | | | VSTFLGWYQQRPGQPPRLLIYDASYR | (Human) | (Human) | (Human) | (Human) | | RPSGPGYFVS |
| | | | APDIPVRFSGSGSGTDFTLTINSLEPED | | | | | | |
| | | | SAVYYCQQRSDGYNFGPGTKLEIK | | | | | | |
| | mAb-87 | 2024 | QSVLTQPASVSGSPGQSITISCTGTSSD | IGHV4-59 | IGHJ4 | IGLV2-14 | IGU3 | 3063 | ARGSQIDLRG |
| | | | VGAYNYVSWYQQHPGKAPKLTVYDV | (Human) | (Human) | (Human) | (Human) | | GLGATFFDY |
| | | | RNRPSGVSNRFSGSKSGNTASLTISGL | | | | | | |
| | | | QAEDEAHYYCSSYTSTNTVFGGGTKLT | | | | | | |
| | | | VL | | | | | | |
| | mAb-88 | 2025 | DIRLTQTPLSLPVTLGQPASISCRSSQI | IGHV1-69 | IGHJ6 | IGKV2-24 | IGKJ3 | 3064 | ARDSDPYTAT |
| | | | AMHSDGNTYLSWFHQRPGQPPRRLIYK | (Human) | (Human) | (Human) | (Human) | | RRHNHYWYA |
| | | | ISNRDSGVPDRFSGSGSGTDFTLKISRV | | | | | | MDV |
| | | | EAEDIGTFYCMQGTDWPRTFGQGTK | | | | | | |
| | | | VDIK | | | | | | |
| | mAb-89 | 2026 | QSALIQPRSVSGSPGQSVTISCTGSSST | IGHV3-48 | IGHJ5 | IGLV2-11 | IGU3 | 3065 | VRDTDWAFD |
| | | | FGTDNHISWYQQLPGKVPKLIIHAVSQ | (Human) | (Human) | (Human) | (Human) | | s |
| | | | RPSVVPDRFSGSRSGNTASLTISGLQA | | | | | | |
| | | | EDEADYYCCSSPGTITWVFGGGTKVT | | | | | | |
| | | | VL | | | | | | |
| | mAb-9 | 2027 | DIRLTQSPSSLSASVGDRVTIACRASQS | IGHV1-8 | IGHJ6 | IGKV1-39 | IGKJ1 | 3066 | ARRGNNFGY |
| | | | VSNYLNWYQQKPGKAPKLLIYAASSLQ | (Human) | (Human) | (Human) | (Human) | | YYYYTVDV |
| | | | NGVPSRFGGSGSGTDFTLTISSLQPED | | | | | | |
| | | | FATYYCQQCYSYPPTFGHGTKVEIK | | | | | | |
| | mAb-90 | 2028 | DIRMTQSPDSLAVSLGERATINCRTSQ | IGHV1-46 | IGHJ3 | IGKV4-1 | IGKJ3 | 3067 | ARVLAGSSHE |
| | | | SVLYSSNNKNYLGWYQQKPGQPPKLL | (Human) | (Human) | (Human) | (Human) | | WQLTHDAFD |
| | | | IYWASTRESGVPDRFSGSGSGTDFTLTI | | | | | | |
| | | | SSLQAEDVAVYYCQQYYSTPYTFGQGT | | | | | | |
| | | | KVDIK | | | | | | |
| | mAb-91 | 2029 | QSALTQPASVSGSPGQSITISCTGTNSD | IGHV3-23 | IGHJ4 | IGLV2-14 | IGU3 | 3068 | AKGDWIRYF |
| | | | ISNSYSVSWYQQYPGKAPKLVIFDVIN | (Human) | (Human) | (Human) | (Human) | | DWSLPISFFD |
| | | | RPSGVSNRFSGSKSGNTASLTISGLQA | | | | | | Y |
| | | | DDEADYYCCSYTRTNTPVLFGGGTKLT | | | | | | |
| | | | VL | | | | | | |
| | mAb-92 | 2030 | DIQLTQSPATLSVSPGERATLSCRASQS | IGHV4-61 | IGHJ4 | IGKV3-15 | IGKJ4 | 3069 | ARTTSPLTYSG |
| | | | VTKHLAWYQQKPGQAPRLLIYGASTR | (Human) | (Human) | (Human) | (Human) | | HWPLFDY |
| | | | ATGVPARFSGSGSDTEFSLTISSLQSED | | | | | | |
| | | | FAVYYCQQYYSWPPLTFGGGTKLEIK | | | | | | |
| | mAb-93 | 2031 | DIVMTQTPLSLPVTLGQPASISCRASQ | IGHV1-69 | IGHJ6 | IGKV2-30 | IGKJ3 | 3070 | VRDSDPYTAT |
| | | | TVVHTNGNTYLNWFHQRPGQSPRRLI | (Human) | (Human) | (Human) | (Human) | | SRNNHYWYG |
| | | | YEVSNRDSGVPDRFSGSGSGTDFTLSI | | | | | | MDV |
| | | | SRVEAEDIGVYYCMQGTDWPRTFGP | | | | | | |
| | | | GTKVEIK | | | | | | |
| | mAb-94 | 2032 | DIQLTQSPLSLPVGLGQSASISCRSSQR | IGHV1-69 | IGHJ6 | IGKV2-30 | IGKJ2 | 3071 | ARDPSILNTG |
| | | | VVHTDGNTYLNWYHQRPGQSPRRLIY | (Human) | (Human) | (Human) | (Human) | | NHHWYDLDI |
| | | | KVSNRDSGVPDRFSGSGSGTDFTLRIS | | | | | | |
| | | | RVEAEDVGVYYCMQSTDWPRTFGQG | | | | | | |
| | | | TKLEIK | | | | | | |
| | mAb-95 | 2033 | DIVLTQSPLSLPVGLGQSASISCRSSQR | IGHV1-69 | IGHJ3 | IGKV2-30 | IGKJ2 | 3072 | ARDPSILNTG |
| | | | VVHTDGNTYLHWFHQRPGQSPRRLIY | (Human) | (Human) | (Human) | (Human) | | NHHWYDLDI |
| | | | KVSNRDSGVPDRFSGSGSGTDFTLRIS | | | | | | |
| | | | RVEAEDVGVYYCMQGTEWPRTFGQ | | | | | | |
| | | | GTKLEIK | | | | | | |
| | mAb-96 | 2034 | ETTLTQSPVTLSVSPGERATLSCRASQS | IGHV3-66 | IGHJ5 | IGKV3-15 | IGKJ4 | 3073 | VRMDWME |
| | | | VISNLAWYQQKPGQAPRLLIFGASTRA | (Human) | (Human) | (Human) | (Human) | | WMKYYFDS |
| | | | TGVPARFSGSGSGTEFTLTISSLQSEDF | | | | | | |
| | | | AVYYCQQYNNWPSLTFGGGTKLEIK | | | | | | |
| | mAb-97 | 2035 | DIQVTQSPLSLPVGLGQSASISCRSSQR | IGHV1-69 | IGHJ3 | IGKV2-30 | IGKJ3 | 3074 | ARDPSILNTG |
| | | | VVHTDGNTYLNWFHQRPGQSPRRLIY | (Human) | (Human) | (Human) | (Human) | | NHHWYDLD |
| | | | KVSNRDSGVPDRFSGSGSGTDFTLRIS | | | | | | M |
| | | | RVEAEDVGVYYCMQATEWPRTFGQG | | | | | | |
| | | | TKVDIK | | | | | | |
| | mAb-98 | 2036 | EIVMTQSPATLSLSPGERATLSCRASQS | IGHV3-30 | IGHJ5 | IGKV3-11 | IGKJ2 | 3075 | VRDDVLQHS |
| | | | VSTFLGWYQQRPGQPPRLLIYDASYR | (Human) | (Human) | (Human) | (Human) | | RPSGPGYFVS |
| | | | APDIPVRFSGSGSGTDFTLTINSLEPED | | | | | | |
| | | | SAVYYCQQRSDGYNFGPGTKLEIK | | | | | | |
| | mAb-99 | 2037 | QPVLTQPPSVSVSPGQTARITCSGDAL | IGHV4-4 | IGHJ6 | IGLV3-10 | IGU3 | 3076 | ATMWGGLCT |
| | | | PRRYAYWYQQRSGQAPVLVIYEDNKR | (Human) | (Human) | (Human) | (Human) | | ASNCYGNPM |
| | | | PSGIPERFSAFSSGTRATLTISGAQVED | | | | | | DV |
| | | | QADYYCYSTDSTANYKVFGGGTKLTVL | | | | | | |
| | mBG17 | 2038 | DIVMSQSPSSLAVSVGEKITMSCKSSQ | IGHV6-6 | IGHJ4 | IGKV8-30 | IGKJ1 | 3077 | TRSAMDY |
| | | | SLLYTSDQKNYLAWFQQKPGQSPKLLI | (Mouse) | (Mouse) | (Mouse) | (Mouse) | | |
| | | | FWASTRDSGVPDRFTGSGSGTDFTLTI | | | | | | |
| | | | SSVKAEDLAVYYCQQFYNYPRTFGGG | | | | | | |
| | | | TKLEIK | | | | | | |
| | mBG21 | 2039 | IVMTQTPKFLLVSAGDRVTITCKASQS | IGHV9-2- | IGHJ3 | IGKV6-32 | IGKJ1 | 3078 | ALRR |
| | | | VSNDVAWFQQKPGQSPKKLLIYFASN | 1 | (Mouse) | (Mouse) | (Mouse) | | |
| | | | RYTGVPDRFTGSGYGTDFTFTITTVQA | (Mouse) | | | | | |
| | | | EDLAVYFCQQDYSSPWTFGGGTKLEIK | | | | | | |
| | mBG22 | 2040 | IVMTQTPKFLLVSAGDRVTITCKASQS | IGHV9-2- | IGHJ3 | IGKV6-32 | IGKJ1 | 3079 | ALRR |
| | | | VSNDVAWFQQKPGQSPKLLIYFASNR | 1 | (Mouse) | (Mouse) | (Mouse) | | |
| | | | YTGVPDRFTGSGYGTDFTFTITTVQAE | (Mouse) | | | | | |
| | | | DLAVYFCQQDYSSPWTFGGGTKLEIK | | | | | | |
| | mBG57 | 2041 | DIVMTQAAPSEPVTPGESVSISCGSSK | IGHV9-2- | IGHJ3 | IGKV2-137 | IGKJ5 | 3080 | ALRR |
| | | | SLLHSNDNTYLYWFLQRPGQSPQLLIY | 1 | (Mouse) | (Mouse) | (Mouse) | | |
| | | | RMSNLASGVPDRFTGSGSGTAFTLRIS | (Mouse) | | | | | |
| | | | RVEAEDVGVYYCMQHLENPLGVRWR | | | | | | |
| | | | HQAGNQT | | | | | | |
| | mBG67 | 2042 | QIVLTQSPAIMSASLGERVTMTCTASS | IGHV5-6- | IGHJ1 | IGKV4-74 | IGKJ1 | 3081 | ARIYDFDEDY |
| | | | SVSSSYLHWYQQKPGSSPKLWIYSTSN | 3 | (Mouse) | (Mouse) | (Mouse) | | FDV |
| | | | LASGVPARFSGSGSGTSYSLTISSMEAE | (Mouse) | | | | | |
| | | | DAATYYCLQYHRSPWTFGGGTKLEIK | | | | | | |
| | MD17 | | ND | IGHV3-64 | ND | IGKV1-39 | ND | 3082 | VKDQDSSSW |
| | | | | (Human) | | (Human) | | | YDAFDI |
| | MD29 | | ND | IGHV3-64 | ND | IGKV1-39 | ND | 3083 | VKDQDSSSW |
| | | | | (Human) | | (Human) | | | YDAFDI |
| | MD45 | | ND | IGHV3-53 | ND | IGKV3-20 | ND | 3084 | ARDLSVRGG |
| | | | | (Human) | | (Human) | | | MDV |
| | MD47 | | ND | IGHV3-23 | ND | IGLV3-21 | ND | 3085 | AKDLVTAPSY |
| | | | | (Human) | | (Human) | | | EAFDI |
| | MD62 | | ND | IGHV3-53 | ND | IGKV1-12 | ND | 3086 | ARDLQYYGM |
| | | | | (Human) | | (Human) | | | DV |
| | MD63 | | ND | IGHV3-64 | ND | IGKV1-39 | ND | 3087 | VKDQDSNSW |
| | | | | (Human) | | (Human) | | | YDAFDI |
| | MD65 | | ND | IGHV3-66 | ND | IGKV3-20 | ND | 3088 | ARDLAVAGAF |
| | | | | (Human) | | (Human) | | | DI |
| | MD67 | | ND | IGHV3-53 | ND | IGKV3-20 | ND | 3089 | ARDLSVRGG |
| | | | | (Human) | | (Human) | | | MDV |
| | mNb6 | | ND | ND | ND | ND | ND | | ND |
| | mNb6-tri | | ND | ND | ND | ND | ND | | ND |
| | MnCit3p1_ | 2043 | QAVVTQEPSLTVSPGGTVTLTCGSSTG | IGHV3-23 | IGHJ4 | IGLV7-46 | IGU3 | 3090 | ALASGSYFGG |
| | G9 | | PVTSDHYPYWFQQKPGQAPTTLIYDT | (Human) | (Human) | (Human) | (Human) | | ANY |
| | | | NNKHSWTPARFSGSLLGGKAALTLSG | | | | | | |
| | | | AQPEDEAEYYCLLSYTGARVFGGGTKL | | | | | | |
| | | | TVL | | | | | | |
| | MnC2t1p1_ | 2044 | DIQMTQSPSSVSASVGDRVTITCRASQ | IGHV3-66 | IGHJ4 | IGKV1D-12 | IGKJ1 | 3091 | ATGARFGESP |
| | A3 | | GISSWLAWYQQKPGKAPKLLIYAASSL | (Human) | (Human) | (Human) | (Human) | | FDY |
| | | | QSGVPSRFSGSGSGTDFTLTISSLQPED | | | | | | |
| | | | FATYYCQQANSFPGTFGQGTKVEIK | | | | | | |
| | MnC2t1p1_ | 2045 | DIQMTQSPSSVSASVGDRVTITCRASQ | IGHV3-66 | IGHJ4 | IGKV1D-12 | IGKJ1 | 3092 | ATGARFGESP |
| | C5 | | GISSWLAWYQQKPGKAPKLLIYAASSL | (Human) | (Human) | (Human) | (Human) | | FDY |
| | | | QSGVPSRFSGSGSGTDFTLTISSLQPED | | | | | | |
| | | | FATYYCQQANSFPGTFGQGTKVEIK | | | | | | |
| | MnC2t2p1_ | 2046 | DIQMTQSPSSLSASVGDRVTITCRASQ | IGHV1-69 | IGHJ5 | IGKV1-39 | IGKJ2 | 3093 | AREGGLDYFG |
| | C11 | | NISSYLNWYQQKPGKAPNLLIYAASSL | (Human) | (Human) | (Human) | (Human) | | SRNSGWTYT |
| | | | QSGVPPRFSGSGSGTDFTLTISSLQPED | | | | | | WFDP |
| | | | FATYYCQQSYSTLYSFGQGTKLEIK | | | | | | |
| | MnC4t1p1_ | 2047 | DIQMTQSPSSLSASVGDRVTITCRASQ | IGHV4-39 | IGHJ3 | IGKV1-17 | IGKJ3 | 3094 | ARGVNYYDR |
| | A10 | | GIRNDLGWYEQKPGKAPKRLIYAASSL | (Human) | (Human) | (Human) | (Human) | | NGYYRNDGF |
| | | | ESGVPSRFSGSGSGTEFTLTISSLQPED | | | | | | DI |
| | | | FATYYCLQHNTYPFTFGPGTRVDIK | | | | | | |
| | MnC4t1p1_ | 2048 | EIVLTQSPGTLSLSPGERATLSCRASQS | IGHV3-48 | IGHJ4 | IGKV3-20 | IGKJ1 | 3095 | ASSKGFCSGG |
| | A11 | | VSSSYLAWYQQKPGQAPRLLIYGVSSR | (Human) | (Human) | (Human) | (Human) | | SCSDY |
| | | | ATGIPDRFSGSGSGTDFTLTISRLEPED | | | | | | |
| | | | FVVYYCHQYGSSPWTFGQGTKVEIK | | | | | | |
| | MnC4t2p1_ | 2049 | DIQMIQSPSSVSASVGDRVTITCRASQ | IGHV3-9 | IGHJ2 | IGKV1-12 | IGKJ3 | 3096 | AKDLRRQDYY |
| | B3 | | GISSWLAWYQQKPGKAPKLLIYAASTL | (Human) | (Human) | (Human) | (Human) | | ADWYFDL |
| | | | LSAVPSRFSGSGSGTDFTLTISSLQPED | | | | | | |
| | | | FATYYCQQGNSFPFTFGPGTIVDV | | | | | | |
| | MnC4t2p1_ | 2050 | DIQMTQSPSSLSASVGDRVTITCRASQ | IGHV4-39 | IGHJ3 | IGKV1-17 | IGKJ3 | 3097 | ARGVNYYDR |
| | D10 | | GIRNDLGWYEQKPGKAPKRLIYAASSL | (Human) | (Human) | (Human) | (Human) | | NGYYRNDGF |
| | | | ESGVPSRFSGSGSGTEFTLTISSLQPED | | | | | | DI |
| | | | FATYYCLQHNTYPFTFGPGTRVDIK | | | | | | |
| | MnC4t2p1_ | 2051 | DIQMTQSPSSVSASVGDRVTITCRASQ | IGHV3-9 | IGHJ2 | IGKV1-12 | IGKJ3 | 3098 | AKDLRRQDYY |
| | E6 | | GISSWLAWYQQKPGKAPKLLIYAASTL | (Human) | (Human) | (Human) | (Human) | | ADWYFDL |
| | | | LSAVPSRFSGSGSGTDFTLTISSLQPED | | | | | | |
| | | | FATYYCQQGNSFPFTFGPGTKVDV | | | | | | |
| | MnC4t2p1_ | 2052 | DIQMTQSPSSLSASVGDRVTITCRASQ | IGHV4-39 | IGHJ3 | IGKV1-17 | IGKJ3 | 3099 | ARGVNYYDR |
| | F5 | | GIRNDLGWYEQKPGKAPKRLIYAASSL | (Human) | (Human) | (Human) | (Human) | | NGYYRNDGF |
| | | | ESGVPSRFSGSGSGTEFTLTISSLQPED | | | | | | DI |
| | | | FATYYCLQHNTYPFTFGPGTRVDIK | | | | | | |
| | MnC4t2p2_ | 2053 | EIVLTQSPGTLSLSPGERATLSCRASHS | IGHV7-4- | IGHJ4 | IGKV3-20 | IGKJ5 | 3100 | AKIGSRNSLG |
| | A4 | | VDRSYLAWYQQKPGLAPRLLIYGASSR | 1 | (Human) | (Human) | (Human) | | V |
| | | | ATGIPDRFSGSGSGTDFTLTISRLEPED | (Human) | | | | | |
| | | | FALYYCQHFGTSSVTFGRGTRLEIK | | | | | | |
| | MnC5t2p1_ | 2054 | EIVLTQSPGTLSLSPGERATLSCRASQS | IGHV1-58 | IGHJ3 | IGKV3-20 | IGKJ1 | 3101 | AAPRCSGGSC |
| | G1 | | VSSSYLAWYQHKPGQAPRLLICGASSR | (Human) | (Human) | (Human) | (Human) | | YDGFDI |
| | | | ATGIPDRFSGSGSGTGFTLTISRLEPED | | | | | | |
| | | | FAVYYCQQYGSSPWTFGQGTKVEIK | | | | | | |
| | MR10 | | N/A | IGHV3S53 | IGHJ4 | N/A | N/A | 3102 | NVKDEGATTK |
| | | | | (Alpaca) | (Alpaca) | | | | VYDY |
| | MR14 | | N/A | IGHV3S53 | IGHJ4 | N/A | N/A | 3103 | NVKDWGAA |
| | | | | (Alpaca) | (Alpaca) | | | | NKYYDY |
| | MR17 | | N/A | IGHV3S53 | IGHJ4 | N/A | N/A | 3104 | NVKDDGQLA |
| | | | | (Alpaca) | (Alpaca) | | | | YHYDY |
| | MR17_K56W | | N/A | IGHV3S53 | IGHJ4 | N/A | N/A | 3105 | NVKDDGQLA |
| | | | | (Alpaca) | (Alpaca) | | | | YHYDY |
| | MR17_K99W | | N/A | IGHV3S5 | IGHJ4 | N/A | N/A | 3106 | NVWDDGQL |
| | | | | (Alpaca) | (Alpaca) | | | | AYHYDY |
| | MR17_K99Y | | N/A | IGHV3S53 | IGHJ4 | N/A | N/A | 3107 | NVYDDGQLA |
| | | | | (Alpaca) | (Alpaca) | | | | YHYDY |
| | MR2 | | N/A | IGHV3S53 | IGHJ4 | N/A | N/A | 3108 | NVKDYGWYN |
| | | | | (Alpaca) | (Alpaca) | | | | SQYDY |
| | MR3 | | N/A | IGHV3S53 | IGHJ4 | N/A | N/A | 3109 | NVKDYGAAS |
| | | | | (Alpaca) | (Alpaca) | | | | WEYDY |
| | MR4 | | N/A | IGHV3S53 | IGHJ4 | N/A | N/A | 3110 | NVKDFGGHQ |
| | | | | (Alpaca) | (Alpaca) | | | | AYYDY |
| | MR6 | | N/A | IGHV3S53 | IGHJ4 | N/A | N/A | 3111 | NVKDEGDTS |
| | | | | (Alpaca) | (Alpaca) | | | | ASYDY |
| | MR7 | | N/A | IGHV3S53 | IGHJ4 | N/A | N/A | 3112 | NVKDEGYFSD |
| | | | | (Alpaca) | (Alpaca) | | | | EYDY |
| | MR8 | | N/A | IGHV3S53 | IGHJ4 | N/A | N/A | 3113 | NVKDWGSSN |
| | | | | (Alpaca) | (Alpaca) | | | | QYYDY |
| | Nb11 | | ND | ND | ND | ND | ND | | ND |
| | Nb11-59 | | ND | ND | ND | ND | ND | | ND |
| | Nb3 | | ND | ND | ND | ND | ND | | ND |
| | Nb3-bi | | ND | ND | ND | ND | ND | | ND |
| | Nb3-tri | | ND | ND | ND | ND | ND | | ND |
| | Nb4-43 | | ND | ND | ND | ND | ND | | ND |
| | Nb6 | | ND | ND | ND | ND | ND | | ND |
| | Nb6-tri | | ND | ND | ND | ND | ND | | ND |
| | NIH- | | N/A | IGHV3-3 | IGHJ7 | N/A | N/A | 3114 | AAVPSTYYNG |
| | CoVnb- | | | (Alpaca) | (Alpaca) | | | | SYYYTCHPGG |
| | 101 | | | | | | | | MDY |
| | NIH- | | N/A | IGHV3-3 | IGHJ7 | N/A | N/A | 3115 | AAVPSTYYSG |
| | CoVnb- | | | (Alpaca) | (Alpaca) | | | | TYYYNCHPGG |
| | 102 | | | | | | | | MDY |
| | NIH- | | N/A | IGHV3-3 | IGHJ7 | N/A | N/A | 3116 | ATAPGTYYKG |
| | CoVnb- | | | (Alpaca) | (Alpaca) | | | | SYYPMCHYYG |
| | 103 | | | | | | | | MDY |
| | NIH- | | N/A | IGHV3-3 | IGHJ7 | N/A | N/A | 3117 | ATRPLTYYSGS |
| | CoVnb- | | | (Alpaca) | (Alpaca) | | | | YYTTCSDYGM |
| | 104 | | | | | | | | DY |
| | NIH- | | N/A | IGHV3-3 | IGHJ7 | N/A | N/A | 3118 | AAVPSTYYSG |
| | CoVnb- | | | (Alpaca) | (Alpaca) | | | | SYYYTCHPGG |
| | 105 | | | | | | | | MDY |
| | NIH- | | N/A | IGHV3-3 | IGHJ7 | N/A | N/A | 3119 | AAVPSTYYSG |
| | CoVnb- | | | (Alpaca) | (Alpaca) | | | | SYYYTCHPGG |
| | 106 | | | | | | | | MDY |
| | NIH- | | N/A | IGHV3-3 | IGHJ7 | N/A | N/A | 3120 | AAVPSTYYSG |
| | CoVnb- | | | (Alpaca) | (Alpaca) | | | | SYYYTCHPGG |
| | 107 | | | | | | | | MDY |
| | NIH- | | N/A | IGHV3-3 | IGHJ7 | N/A | N/A | 3121 | AAVPSTYYSG |
| | CoVnb- | | | (Alpaca) | (Alpaca) | | | | SYYYTCHPGG |
| | 108 | | | | | | | | MDY |
| | NIH- | | N/A | IGHV3-3 | IGHJ7 | N/A | N/A | 3122 | ASFPSTYYSGS |
| | CoVnb- | | | (Alpaca) | (Alpaca) | | | | YYYTCHPGG |
| | 109 | | | | | | | | MDY |
| | NIH- | | N/A | IGHV3-3 | IGHJ7 | N/A | N/A | 3123 | AAVPSTYYSG |
| | CoVnb- | | | (Alpaca) | (Alpaca) | | | | TYYYNCHPGA |
| | 110 | | | | | | | | MHY |
| | NIH- | | N/A | IGHV3-3 | IGHJ7 | N/A | N/A | 3124 | AAVPSTYYSG |
| | CoVnb- | | | (Alpaca) | (Alpaca) | | | | TYYYNCHPGA |
| | 111 | | | | | | | | MHY |
| | NIH- | | N/A | IGHV3-3 | IGHJ7 | N/A | N/A | 3125 | AAVPSTYYSG |
| | CoVnb- | | | (Alpaca) | (Alpaca) | | | | TYYYTCHPGG |
| | 112 | | | | | | | | MDY |
| | NIH- | | N/A | IGHV3-3 | IGHJ7 | N/A | N/A | 3126 | AAVPSTYYSG |
| | CoVnb- | | | (Alpaca) | (Alpaca) | | | | TYYYTCHPGG |
| | 113 | | | | | | | | MDY |
| | P2B-2F6 | 2055 | QSALTQPPSASGSPGQSVTISCTGTSS | IGHV4- | IGHJ3 | IGLV2-8 | IGU3 | 3127 | ARAVVGIVVV |
| | | | DVGGYNYVSWYQQHPGKAPKLMIYE | 382 | (Human) | (Human) | (Human) | | PAAGRRAFDI |
| | | | VSKRPSGVPDRFSGSKSGNTASLTVSG | (Human) | | | | | |
| | | | LQAEDEADYYCSSYAGSNNLVFGGGT | | | | | | |
| | | | KLTVL | | | | | | |
| | S110 | | ND | IGHV3-30 | ND | IGKV2-30 | ND | 3128 | AKDRFQFARS |
| | | | | (Human) | | (Human) | | | WYGDYFDY |
| | S124 | | ND | IGHV2-26 | ND | IGKV1-39 | ND | 3129 | ARINTAAYDY |
| | | | | (Human) | | (Human) | | | DSTTFDI |
| | S303 | | ND | IGHV3-23 | ND | IGKV1-5 | ND | 3130 | ARERDDIFPM |
| | | | | (Human) | | (Human) | | | GLNAFDI |
| | S304 | | ND | IGHV3-13 | ND | IGKV1-39 | ND | 3131 | ARGDSSGYYY |
| | | | | (Human) | | (Human) | | | YFDY |
| | S306 | | ND | IGHV1-18 | ND | IGKV3-11 | ND | 3132 | ASDYFDSSGY |
| | | | | (Human) | | (Human) | | | YHSFDY |
| | S309 | 2056 | EIVLTQSPGTLSLSPGERATLSCRASQT | IGHV1-18 | IGHJ4 | IGKV3-20 | IGKJ4 | 3133 | ARDYTRGAW |
| | | | VSSTSLAWYQQKPGQAPRLLIYGASSR | (Human) | (Human) | (Human) | (Human) | | FGESLIGGFD |
| | | | ATGIPDRFSGSGSGTDFTLTISRLEPED | | | | | | N |
| | | | FAVYYCQQHDTSLTFGGGTKVEIK | | | | | | |
| | S310 | | ND | IGHV1-69 | ND | IGLV2-23 | ND | 3134 | ATRTYDSSGY |
| | | | | (Human) | | (Human) | | | RPYYYGLDV |
| | S315 | | ND | IGHV3-7 | ND | IGLV3-25 | ND | 3135 | ARDLWWND |
| | | | | (Human) | | (Human) | | | QAHYYGMDV |
| | Sb#1 | | N/A | IGHV3-3 | IGHJ4 | N/A | N/A | 3136 | RVFVGWHY |
| | | | | (Alpaca) | (Alpaca) | | | | |
| | Sb#10 | | N/A | IGHV3-3 | IGHJ4 | N/A | N/A | 3137 | TVYVGYEY |
| | | | | (Alpaca) | (Alpaca) | | | | |
| | Sb#11 | | N/A | IGHV3-3 | IGHJ4 | N/A | N/A | 3138 | EVEVGKWY |
| | | | | (Alpaca) | (Alpaca) | | | | |
| | Sb#12 | | N/A | IGHV3-3 | IGHJ5 | N/A | N/A | 3139 | YVWVGQEY |
| | | | | (Alpaca) | (Alpaca) | | | | |
| | Sb#13 | | N/A | IGHV3-3 | IGHJ4 | N/A | N/A | 3140 | WVIVGEYY |
| | | | | (Alpaca) | (Alpaca) | | | | |
| | Sb#14 | | N/A | IGHV3-3 | IGHJ4 | N/A | N/A | 3141 | YVYVGSSY |
| | | | | (Alpaca) | (Alpaca) | | | | |
| | Sb#15 | | N/A | IGHV3-3 | IGHJ4 | N/A | N/A | 3142 | FVYVGRSY |
| | | | | (Alpaca) | (Alpaca) | | | | |
| | Sb#16 | | N/A | IGHV3S53 | IGHJ4 | N/A | N/A | 3143 | IVWVGAQY |
| | | | | (Alpaca) | (Alpaca) | | | | |
| | Sb#17 | | N/A | IGHV3-3 | IGHJ4 | N/A | N/A | 3144 | HVWVGSLY |
| | | | | (Alpaca) | (Alpaca) | | | | |
| | Sb#18 | | N/A | IGHV3-3 | IGHJ4 | N/A | N/A | 3145 | YVYVGASY |
| | | | | (Alpaca) | (Alpaca) | | | | |
| | Sb#19 | | N/A | IGHV3-3 | IGHJ4 | N/A | N/A | 3146 | YVYVGSSY |
| | | | | (Alpaca) | (Alpaca) | | | | |
| | Sb#2 | | N/A | IGHV3-3 | IGHJ4 | N/A | N/A | 3147 | RAVYVGMHY |
| | | | | (Alpaca) | (Alpaca) | | | | |
| | Sb#20 | | N/A | IGHV3-3 | IGHJ4 | N/A | N/A | 3148 | YVYVGKSY |
| | | | | (Alpaca) | (Alpaca) | | | | |
| | Sb#21 | | N/A | IGHV3-3 | IGHJ4 | N/A | N/A | 3149 | FVGVGTHY |
| | | | | (Alpaca) | (Alpaca) | | | | |
| | Sb#22 | | N/A | IGHV3-3 | IGHJ4 | N/A | N/A | 3150 | FVYVGKSY |
| | | | | (Alpaca) | (Alpaca) | | | | |
| | Sb#23 | | N/A | IGHV3-3 | IGHJ4 | N/A | N/A | 3151 | FVYVGKSY |
| | | | | (Alpaca) | (Alpaca) | | | | |
| | Sb#25 | | N/A | IGHV3S53 | IGHJ4 | N/A | N/A | 3152 | NVKDFGTHH |
| | | | | (Alpaca) | (Alpaca) | | | | YAYDY |
| | Sb#26 | | N/A | IGHV3S53 | IGHJ4 | N/A | N/A | 3153 | NVKDKGMAV |
| | | | | (Alpaca) | (Alpaca) | | | | QWYDY |
| | Sb#27 | | N/A | IGHV3S53 | IGHJ4 | N/A | N/A | 3154 | NVKDEGDMF |
| | | | | (Alpaca) | (Alpaca) | | | | TAYDY |
| | Sb#28 | | N/A | IGHV3-3 | IGHJ4 | N/A | N/A | 3155 | NVKDSGQWR |
| | | | | (Alpaca) | (Alpaca) | | | | QEYDY |
| | Sb#29 | | N/A | IGHV3S53 | IGHJ4 | N/A | N/A | 3156 | NVKDFGYTW |
| | | | | (Alpaca) | (Alpaca) | | | | HEYDY |
| | Sb#3 | | N/A | IGHV3-3 | IGHJ4 | N/A | N/A | 3157 | VVWVGHNY |
| | | | | (Alpaca) | (Alpaca) | | | | |
| | Sb#30 | | N/A | IGHV3-3 | IGHJ4 | N/A | N/A | 3158 | NVKDYGQAH |
| | | | | (Alpaca) | (Alpaca) | | | | AYYDY |
| | Sb#31 | | N/A | IGHV3-3 | IGHJ4 | N/A | N/A | 3159 | NVKDTGTTED |
| | | | | (Alpaca) | (Alpaca) | | | | YDY |
| | Sb#32 | | N/A | IGHV3-3 | IGHJ4 | N/A | N/A | 3160 | NVKDAGRVY |
| | | | | (Alpaca) | (Alpaca) | | | | NSYDY |
| | Sb#33 | | N/A | IGHV3S53 | IGHJ4 | N/A | N/A | 3161 | NVKDTGTYRF |
| | | | | (Alpaca) | (Alpaca) | | | | YYDY |
| | Sb#34 | | N/A | IGHV3S53 | IGHJ4 | N/A | N/A | 3162 | NVKDAGVYN |
| | | | | (Alpaca) | (Alpaca) | | | | RYYDY |
| | Sb#35 | | N/A | IGHV3-3 | IGHJ4 | N/A | N/A | 3163 | NVKDWGFAS |
| | | | | (Alpaca) | (Alpaca) | | | | HAYDY |
| | Sb#36 | | N/A | IGHV3S53 | IGHJ4 | N/A | N/A | 3164 | NVKDFGWQ |
| | | | | (Alpaca) | (Alpaca) | | | | HQEYDY |
| | Sb#37 | | N/A | IGHV3-3 | IGHJ4 | N/A | N/A | 3165 | NVKDSGSFN |
| | | | | (Alpaca) | (Alpaca) | | | | QAYDY |
| | Sb#38 | | N/A | IGHV3S53 | IGHJ4 | N/A | N/A | 3166 | NVKDYGVHF |
| | | | | (Alpaca) | (Alpaca) | | | | KRYDY |
| | Sb#39 | | N/A | IGHV3-3 | IGHJ4 | N/A | N/A | 3167 | NVKDAGNTT |
| | | | | (Alpaca) | (Alpaca) | | | | SAYDY |
| | Sb#4 | | N/A | IGHV3-3 | IGHJ4 | N/A | N/A | 3168 | EVQVGAWY |
| | | | | (Alpaca) | (Alpaca) | | | | |
| | Sb#40 | | N/A | IGHV3S53 | IGHJ4 | N/A | N/A | 3169 | NVKDIDAEAY |
| | | | | (Alpaca) | (Alpaca) | | | | AYDY |
| | Sb#41 | | N/A | IGHV3-3 | IGHJ4 | N/A | N/A | 3170 | NVKDSGQWR |
| | | | | (Alpaca) | (Alpaca) | | | | VQYDY |
| | Sb#42 | | N/A | IGHV3S53 | IGHJ4 | N/A | N/A | 3171 | NVKDHGAQN |
| | | | | (Alpaca) | (Alpaca) | | | | QMYDY |
| | Sb#45 | | N/A | IGHV3S53 | IGHJ4 | N/A | N/A | 3172 | NVKDVGHHY |
| | | | | (Alpaca) | (Alpaca) | | | | EYYDY |
| | Sb#46 | | N/A | IGHV3S53 | IGHJ4 | N/A | N/A | 3173 | NVKDKGQM |
| | | | | (Alpaca) | (Alpaca) | | | | RAAYDY |
| | Sb#47 | | N/A | IGHV3-3 | IGHJ4 | N/A | N/A | 3174 | NVKDYGSSYY |
| | | | | (Alpaca) | (Alpaca) | | | | KYDY |
| | Sb#48 | | N/A | IGHV3S53 | IGHJ4 | N/A | N/A | 3175 | NVKDAGSSY |
| | | | | (Alpaca) | (Alpaca) | | | | WDYD |
| | Sb#49 | | N/A | IGHV3-3 | IGHJ4 | N/A | N/A | 3176 | AAARWGRTK |
| | | | | (Alpaca) | (Alpaca) | | | | PLNTYYYSY |
| | Sb#5 | | N/A | IGHV3-3 | IGHJ4 | N/A | N/A | 3177 | RVHVGAHY |
| | | | | (Alpaca) | (Alpaca) | | | | |
| | Sb#50 | | N/A | IGHV3-3 | IGHJ4 | N/A | N/A | 3178 | AAATEGHAH |
| | | | | (Alpaca) | (Alpaca) | | | | ALYRLHYY |
| | Sb#51 | | N/A | IGHV3-3 | IGHJ4 | N/A | N/A | 3179 | RVWVGTHY |
| | | | | (Alpaca) | (Alpaca) | | | | |
| | Sb#52 | | N/A | IGHV3-3 | IGHJ4 | N/A | N/A | 3180 | AAAYVGAEN |
| | | | | (Alpaca) | (Alpaca) | | | | PLPYSMYGY |
| | Sb#53 | | N/A | IGHV3-3 | IGHJ4 | N/A | N/A | 3181 | AAADYGASD |
| | | | | (Alpaca) | (Alpaca) | | | | PLWFIHYLY |
| | Sb#55 | | N/A | IGHV3-3 | IGHJ4 | N/A | N/A | 3182 | AAANYGSNFP |
| | | | | (Alpaca) | (Alpaca) | | | | LAEEDYWY |
| | Sb#56 | | N/A | IGHV3-3 | IGHJ4 | N/A | N/A | 3183 | AAAYYFGDDI |
| | | | | (Alpaca) | (Alpaca) | | | | PLWWEAYSY |
| | Sb#58 | | N/A | IGHV3-3 | IGHJ4 | N/A | N/A | 3184 | AAARWGRH |
| | | | | (Alpaca) | (Alpaca) | | | | MPLSATEYSY |
| | Sb#59 | | N/A | IGHV3-3 | IGHJ4 | N/A | N/A | 3185 | AAAAWGNSA |
| | | | | (Alpaca) | (Alpaca) | | | | PLTTYRYYY |
| | Sb#6 | | N/A | IGHV3-3 | IGHJ4 | N/A | N/A | 3186 | YVYVGAQY |
| | | | | (Alpaca) | (Alpaca) | | | | |
| | Sb#61 | | N/A | IGHV3-3 | IGHJ4 | N/A | N/A | 3187 | AAADWGYD |
| | | | | (Alpaca) | (Alpaca) | | | | WPLWDEWY |
| | | | | | | | | | WY |
| | Sb#62 | | N/A | IGHV3-3 | IGHJ4 | N/A | N/A | 3188 | AAANYGANY |
| | | | | (Alpaca) | (Alpaca) | | | | PLYSQQYSY |
| | Sb#63 | | N/A | IGHV3-3 | IGHJ4 | N/A | N/A | 3189 | AAANYGANE |
| | | | | (Alpaca) | (Alpaca) | | | | PLQYTHYNY |
| | Sb#64 | | N/A | IGHV3-3 | IGHJ4 | N/A | N/A | 3190 | AAASYGAAHP |
| | | | | (Alpaca) | (Alpaca) | | | | LSIMRYYY |
| | Sb#65 | | N/A | IGHV3-3 | IGHJ4 | N/A | N/A | 3191 | AAASYGANFP |
| | | | | (Alpaca) | (Alpaca) | | | | LKASDYSY |
| | Sb#66 | | N/A | IGHV3-3 | IGHJ4 | N/A | N/A | 3192 | AAADWGYD |
| | | | | (Alpaca) | (Alpaca) | | | | WPLWDEWY |
| | | | | | | | | | WY |
| | Sb#67 | | N/A | IGHV3-3 | IGHJ4 | N/A | N/A | 3193 | AAATWGHS |
| | | | | (Alpaca) | (Alpaca) | | | | WPLYNDEYW |
| | | | | | | | | | Y |
| | Sb#68 | | N/A | IGHV3-3 | IGHJ4 | N/A | N/A | 3194 | AAAAWGYA |
| | | | | (Alpaca) | (Alpaca) | | | | WPLHQDDY |
| | | | | | | | | | WY |
| | Sb#69 | | N/A | IGHV3-3 | IGHJ5 | N/A | N/A | 3195 | AAATWGYSW |
| | | | | (Alpaca) | (Alpaca) | | | | PLIAEYNWY |
| | Sb#7 | | N/A | IGHV3-3 | IGHJ4 | N/A | N/A | 3196 | FVKVGNWY |
| | | | | (Alpaca) | (Alpaca) | | | | |
| | Sb#71 | | N/A | IGHV3-3 | IGHJ4 | N/A | N/A | 3197 | AAANWGYS |
| | | | | (Alpaca) | (Alpaca) | | | | WPLYEADDW |
| | | | | | | | | | Y |
| | Sb#8 | | N/A | IGHV3-3 | IGHJ4 | N/A | N/A | 3198 | YVYVGGSY |
| | | | | (Alpaca) | (Alpaca) | | | | |
| | Sb#9 | | N/A | IGHV3-3 | IGHJ4 | N/A | N/A | 3199 | RVFVGMHY |
| | | | | (Alpaca) | (Alpaca) | | | | |
| | Sb100 | | N/A | IGHV3-3 | IGHJ4 | N/A | N/A | 3200 | AAANWGYS |
| | | | | (Alpaca) | (Alpaca) | | | | WPLYQTEYW |
| | | | | | | | | | Y |
| | Sb12 | | N/A | IGHV3-3 | IGHJ4 | N/A | N/A | 3201 | YVKVGEWY |
| | | | | (Alpaca) | (Alpaca) | | | | |
| | Sb13 | | N/A | IGHV3-3 | IGHJ4 | N/A | N/A | 3202 | YVVVGWGY |
| | | | | (Alpaca) | (Alpaca) | | | | |
| | Sb15 | | N/A | IGHV3-3 | IGHJ4 | N/A | N/A | 3203 | FVVVGNGY |
| | | | | (Alpaca) | (Alpaca) | | | | |
| | Sb16 | | N/A | IGHV3-3 | IGHJ4 | N/A | N/A | 3204 | YVYVGGSY |
| | | | | (Alpaca) | (Alpaca) | | | | |
| | Sb17 | | N/A | IGHV3-3 | IGHJ4 | N/A | N/A | 3205 | LVYVGATY |
| | | | | (Alpaca) | (Alpaca) | | | | |
| | Sb2 | | N/A | IGHV3-3 | IGHJ4 | N/A | N/A | 3206 | YVYVGASY |
| | | | | (Alpaca) | (Alpaca) | | | | |
| | Sb21 | | N/A | IGHV3-3 | IGHJ4 | N/A | N/A | 3207 | YVYVGGSY |
| | | | | (Alpaca) | (Alpaca) | | | | |
| | Sb22 | | N/A | IGHV3-3 | IGHJ4 | N/A | N/A | 3208 | YVYVGASY |
| | | | | (Alpaca) | (Alpaca) | | | | |
| | Sb23 | | N/A | IGHV3-3 | IGHJ4 | N/A | N/A | 3209 | AVQVGYWY |
| | | | | (Alpaca) | (Alpaca) | | | | |
| | Sb25 | | N/A | IGHV3-3 | IGHJ4 | N/A | N/A | 3210 | YVYVGAGY |
| | | | | (Alpaca) | (Alpaca) | | | | |
| | Sb27 | | N/A | IGHV3-3 | IGHJ4 | N/A | N/A | 3211 | YVWVGRSY |
| | | | | (Alpaca) | (Alpaca) | | | | |
| | Sb28 | | N/A | IGHV3-3 | IGHJ4 | N/A | N/A | 3212 | YVYVGSSY |
| | | | | (Alpaca) | (Alpaca) | | | | |
| | Sb30 | | N/A | IGHV3-3 | IGHJ4 | N/A | N/A | 3213 | YVYVGESY |
| | | | | (Alpaca) | (Alpaca) | | | | |
| | Sb32 | | N/A | IGHV3-3 | IGHJ4 | N/A | N/A | 3214 | VVWVGEVY |
| | | | | (Alpaca) | (Alpaca) | | | | |
| | Sb37 | | N/A | IGHV3S53 | IGHJ4 | N/A | N/A | 3215 | NVKDEGNTT |
| | | | | (Alpaca) | (Alpaca) | | | | AYYDY |
| | Sb38 | | N/A | IGHV3S53 | IGHJ4 | N/A | N/A | 3216 | NVKDFGTQE |
| | | | | (Alpaca) | (Alpaca) | | | | HYYDY |
| | Sb39 | | N/A | IGHV3S53 | IGHJ4 | N/A | N/A | 3217 | NVKDFGGYR |
| | | | | (Alpaca) | (Alpaca) | | | | YYYDY |
| | Sb40 | | N/A | IGHV3S53 | IGHJ4 | N/A | N/A | 3218 | NVKDEGAIAK |
| | | | | (Alpaca) | (Alpaca) | | | | NYDY |
| | Sb42 | | N/A | IGHV3S53 | IGHJ4 | N/A | N/A | 3219 | NVKDEGYTGY |
| | | | | (Alpaca) | (Alpaca) | | | | YYDY |
| | Sb43 | | N/A | IGHV3-3 | IGHJ4 | N/A | N/A | 3220 | NVKDWGSQ |
| | | | | (Alpaca) | (Alpaca) | | | | DRYYDY |
| | Sb45 | | N/A | IGHV3S53 | IGHJ4 | N/A | N/A | 3221 | NVKDEGKSS |
| | | | | (Alpaca) | (Alpaca) | | | | QVYDY |
| | Sb46 | | N/A | IGHV3S53 | IGHJ4 | N/A | N/A | 3222 | NVKDVGNDQ |
| | | | | (Alpaca) | (Alpaca) | | | | KSYDY |
| | Sb47 | | N/A | IGHV3S53 | IGHJ4 | N/A | N/A | 3223 | NVKDWGTYS |
| | | | | (Alpaca) | (Alpaca) | | | | TYYDY |
| | Sb5 | | N/A | IGHV3-3 | IGHJ4 | N/A | N/A | 3224 | YVYVGASY |
| | | | | (Alpaca) | (Alpaca) | | | | |
| | Sb50 | | N/A | IGHV3S53 | IGHJ4 | N/A | N/A | 3225 | NVKDWGWL |
| | | | | (Alpaca) | (Alpaca) | | | | AQYYDY |
| | Sb52 | | N/A | IGHV3S53 | IGHJ4 | N/A | N/A | 3226 | NVKDEGMW |
| | | | | (Alpaca) | (Alpaca) | | | | QHYYDY |
| | Sb54 | | N/A | IGHV3S53 | IGHJ4 | N/A | N/A | 3227 | NVKDEGNSQ |
| | | | | (Alpaca) | (Alpaca) | | | | SHYDY |
| | Sb56 | | N/A | IGHV3S53 | IGHJ4 | N/A | N/A | 3228 | NVKDAGNSK |
| | | | | (Alpaca) | (Alpaca) | | | | ALYDY |
| | Sb57 | | N/A | IGHV3S53 | IGHJ4 | N/A | N/A | 3229 | NVKDWGRA |
| | | | | (Alpaca) | (Alpaca) | | | | GARYDY |
| | Sb58 | | N/A | IGHV3S53 | IGHJ4 | N/A | N/A | 3230 | NVKDMDRW |
| | | | | (Alpaca) | (Alpaca) | | | | RTTYDY |
| | Sb6 | | N/A | IGHV3-3 | IGHJ4 | N/A | N/A | 3231 | YVWVGNQY |
| | | | | (Alpaca) | (Alpaca) | | | | |
| | Sb60 | | N/A | IGHV3S53 | IGHJ4 | N/A | N/A | 3232 | NVKDWGYEY |
| | | | | (Alpaca) | (Alpaca) | | | | EGYDY |
| | Sb61 | | N/A | IGHV3S53 | IGHJ4 | N/A | N/A | 3233 | NVKDTGTYQ |
| | | | | (Alpaca) | (Alpaca) | | | | AWYDY |
| | Sb62 | | N/A | IGHV3S53 | IGHJ4 | N/A | N/A | 3234 | NVKDWGGY |
| | | | | (Alpaca) | (Alpaca) | | | | QWYYDY |
| | Sb63 | | N/A | IGHV3S53 | IGHJ4 | N/A | N/A | 3235 | NVKDYGAQA |
| | | | | (Alpaca) | (Alpaca) | | | | HYYDY |
| | Sb67 | | N/A | IGHV3S53 | IGHJ4 | N/A | N/A | 3236 | NVKDWGTYN |
| | | | | (Alpaca) | (Alpaca) | | | | SYYDY |
| | Sb7 | | N/A | IGHV3-3 | IGHJ4 | N/A | N/A | 3237 | LVYVGSTY |
| | | | | (Alpaca) | (Alpaca) | | | | |
| | Sb71 | | N/A | IGHV3-3 | IGHJ4 | N/A | N/A | 3238 | AAAHYGDNF |
| | | | | (Alpaca) | (Alpaca) | | | | PLAYQAYLY |
| | Sb75 | | N/A | IGHV3-3 | IGHJ4 | N/A | N/A | 3239 | AAARWGRDE |
| | | | | (Alpaca) | (Alpaca) | | | | PLYHYYYSY |
| | Sb76 | | N/A | IGHV3-3 | IGHJ4 | N/A | N/A | 3240 | NVKDIGAQEV |
| | | | | (Alpaca) | (Alpaca) | | | | HYDY |
| | Sb78 | | N/A | IGHV3-3 | IGHJ4 | N/A | N/A | 3241 | AAANYGNN |
| | | | | (Alpaca) | (Alpaca) | | | | WPLTGVNYW |
| | Sb8 | | N/A | IGHV3-3 | IGHJ4 | N/A | N/A | 3242 | YVWVGDSY |
| | | | | (Alpaca) | (Alpaca) | | | | |
| | Sb83 | | N/A | IGHV3-3 | IGHJ4 | N/A | N/A | 3243 | AAAKYGQNF |
| | | | | (Alpaca) | (Alpaca) | | | | PLSYHAYRY |
| | Sb84 | | N/A | IGHV3-3 | IGHJ4 | N/A | N/A | 3244 | AAARYGRSDP |
| | | | | (Alpaca) | (Alpaca) | | | | LHYHEYSY |
| | Sb85 | | N/A | IGHV3-3 | IGHJ4 | N/A | N/A | 3245 | AAASWGYTW |
| | | | | (Alpaca) | (Alpaca) | | | | PLYTYDYWY |
| | Sb88 | | N/A | IGHV3S53 | IGHJ4 | N/A | N/A | 3246 | NVKDSGQYR |
| | | | | (Alpaca) | (Alpaca) | | | | ENYDY |
| | Sb9 | | N/A | IGHV3-3 | IGHJ4 | N/A | N/A | 3247 | WVYVGDYY |
| | | | | (Alpaca) | (Alpaca) | | | | |
| | Sb90 | | N/A | IGHV3-3 | IGHJ4 | N/A | N/A | 3248 | AAARWGRQY |
| | | | | (Alpaca) | (Alpaca) | | | | PLTFVYYSY |
| | Sb93 | | N/A | IGHV3-3 | IGHJ4 | N/A | N/A | 3249 | AAARWGRTY |
| | | | | (Alpaca) | (Alpaca) | | | | PLSYMAYTY |
| | Sb94 | | N/A | IGHV3-3 | IGHJ4 | N/A | N/A | 3250 | AAARWGRYE |
| | | | | (Alpaca) | (Alpaca) | | | | PLHYAYYSY |
| | Sb95 | | N/A | IGHV3-3 | IGHJ4 | N/A | N/A | 3251 | AAASYGANW |
| | | | | (Alpaca) | (Alpaca) | | | | PLVSAAYTY |
| | Sb97 | | N/A | IGHV3-3 | IGHJ4 | N/A | N/A | 3252 | AAARYGHAQ |
| | | | | (Alpaca) | (Alpaca) | | | | APLHYFWYGY |
| | SR1 | | N/A | IGHV3-3 | IGHJ4 | N/A | N/A | 3253 | YVYVGFSY |
| | | | | (Alpaca) | (Alpaca) | | | | |
| | SR13 | | N/A | IGHV3-3 | IGHJ4 | N/A | N/A | 3254 | YVYVGSSY |
| | | | | (Alpaca) | (Alpaca) | | | | |
| | SR18 | | N/A | IGHV3-3 | IGHJ4 | N/A | N/A | 3255 | YVYVGASY |
| | | | | (Alpaca) | (Alpaca) | | | | |
| | SR31 | | N/A | IGHV3-3 | IGHJ4 | N/A | N/A | 3256 | AVMVGFWY |
| | | | | (Alpaca) | (Alpaca) | | | | |
| | SR34 | | N/A | IGHV3-3 | IGHJ4 | N/A | N/A | 3257 | YVYVGSSY |
| | | | | (Alpaca) | (Alpaca) | | | | |
| | SR38 | | N/A | IGHV3-3 | IGHJ4 | N/A | N/A | 3258 | AVHVGQTY |
| | | | | (Alpaca) | (Alpaca) | | | | |
| | SR4 | | N/A | IGHV3-3 | IGHJ4 | N/A | N/A | 3259 | YVWVGHTY |
| | | | | (Alpaca) | (Alpaca) | | | | |
| | SR5 | | N/A | IGHV3-3 | IGHJ4 | N/A | N/A | 3260 | YVYVGTSY |
| | | | | (Alpaca) | (Alpaca) | | | | |
| | SR7 | | N/A | IGHV3S53 | IGHJ4 | N/A | N/A | 3261 | YVYVGYSY |
| | | | | (Alpaca) | (Alpaca) | | | | |
| | Ty1 | | N/A | IGHV3S1 | IGHJ4 | N/A | N/A | 3262 | AIGLNLSSSSV |
| | | | | (Alpaca) | (Alpaca) | | | | |
| | VH-Fc- | | ND | ND | ND | ND | ND | | ND |
| | B01 | | | | | | | | |
| | VH2-A01- | | ND | ND | ND | ND | ND | | ND |
| | B01 | | | | | | | | |
| | VH2-A01- | | ND | ND | ND | ND | ND | | ND |
| | B02 | | | | | | | | |
| | VH3-B01 | | ND | ND | ND | ND | ND | | ND |
| | VHH-72 | | N/A | IGHV3-3 | IGHJ4 | N/A | N/A | 3263 | AAAGLGTVVS |
| | | | | (Alpaca) | (Alpaca) | | | | EWDYDYDY |
| | W23UACh | | N/A | IGHV3S53 | IGHJ4 | N/A | N/A | 3264 | HALIKNELGFL |
| | | | | (Alpaca) | (Alpaca) | | | | DY |
| | W25UACh | | N/A | IGHV3S53 | IGHJ4 | N/A | N/A | 3265 | HALIKNELGFL |
| | | | | (Alpaca) | (Alpaca) | | | | DY |
| | | | | | | | SEQ | | |
| | | | | | | | ID | | |
| | | | | | | Name | NO.: | CDRL3 | Sources |
| | | | | | | 0304-2F8 | 3266 | MQALQTP | Xiangyang Chi et al., 2020 |
| | | | | | | | | QT | (https://science.sciencemag. |
| | | | | | | | | | org/content/early/ |
| | | | | | | | | | 2020/06/19/science. |
| | | | | | | | | | abc6952/tab-pdf) |
| | | | | | | 0304-3H3 | 3267 | QQYNKWP | Xiangyang Chi et al., 2020 |
| | | | | | | | | PWT | (https://science.sciencemag. |
| | | | | | | | | | org/content/early/ |
| | | | | | | | | | 2020/06/19/science. |
| | | | | | | | | | abc6952/tab-pdf) |
| | | | | | | 0304- | 3268 | QQYYSSPY | Xiangyang Chi et al., 2020 |
| | | | | | | 4A10 | | | (https://science.sciencemag. |
| | | | | | | | | | org/content/early/ |
| | | | | | | | | | 2020/06/19/science. |
| | | | | | | | | | abc6952/tab-pdf) |
| | | | | | | 0304-4A2 | 3269 | HQYYNTPR | Xiangyang Chi et al., 2020 |
| | | | | | | | | T | (https://science.sciencemag. |
| | | | | | | | | | org/content/early/ |
| | | | | | | | | | 2020/06/19/science. |
| | | | | | | | | | abc6952/tab-pdf) |
| | | | | | | 0317-A1 | 3270 | RQRSNWP | Xiangyang Chi et al., 2020 |
| | | | | | | | | PT | (https://science.sciencemag. |
| | | | | | | | | | org/content/early/ |
| | | | | | | | | | 2020/06/19/science. |
| | | | | | | | | | abc6952/tab-pdf) |
| | | | | | | 0317-A2 | 3271 | QQSYSTPP | Xiangyang Chi et al., 2020 |
| | | | | | | | | T | (https://science.sciencemag. |
| | | | | | | | | | org/content/early/ |
| | | | | | | | | | 2020/06/19/science. |
| | | | | | | | | | abc6952/tab-pdf) |
| | | | | | | 0317-A3 | 3272 | QQTYRPP | Xiangyang Chi et al., 2020 |
| | | | | | | | | WT | (https://science.sciencemag. |
| | | | | | | | | | org/content/early/ |
| | | | | | | | | | 2020/06/19/science. |
| | | | | | | | | | abc6952/tab-pdf) |
| | | | | | | 0317-A7 | 3273 | MQTLQTP | Xiangyang Chi et al., 2020 |
| | | | | | | | | | (https://science.sciencemag. |
| | | | | | | | | | org/content/early/ |
| | | | | | | | | | 2020/06/19/science. |
| | | | | | | | | | abc6952/tab-pdf) |
| | | | | | | 0317-A8 | 3274 | QQYDNLPL | Xiangyang Chi et al., 2020 |
| | | | | | | | | T | (https://science.sciencemag. |
| | | | | | | | | | org/content/early/ |
| | | | | | | | | | 2020/06/19/science. |
| | | | | | | | | | abc6952/tab-pdf) |
| | | | | | | 0317-A9 | 3275 | MQATQFP | Xiangyang Chi et al., 2020 |
| | | | | | | | | | (https://science.sciencemag. |
| | | | | | | | | | org/content/early/ |
| | | | | | | | | | 2020/06/19/science. |
| | | | | | | | | | abc6952/tab-pdf) |
| | | | | | | 0317-B1 | 3276 | QQYYSTYG | Xiangyang Chi et al., 2020 |
| | | | | | | | | S | (https://science.sciencemag. |
| | | | | | | | | | org/content/early/ |
| | | | | | | | | | 2020/06/19/science. |
| | | | | | | | | | abc6952/tab-pdf) |
| | | | | | | 0317-C4 | 3277 | GTWDSSLS | Xiangyang Chi et al., 2020 |
| | | | | | | | | VW | (https://science.sciencemag. |
| | | | | | | | | | org/content/early/ |
| | | | | | | | | | 2020/06/19/science. |
| | | | | | | | | | abc6952/tab-pdf) |
| | | | | | | 0317-C9 | 3278 | AAWDDSL | Xiangyang Chi et al., 2020 |
| | | | | | | | | NGW | (https://science.sciencemag. |
| | | | | | | | | | org/content/early/ |
| | | | | | | | | | 2020/06/19/science. |
| | | | | | | | | | abc6952/tab-pdf) |
| | | | | | | 10C10 | 3279 | LQHNNYPL | Xiangyang Chi et al., 2020 |
| | | | | | | | | T | (https://science.sciencemag. |
| | | | | | | | | | org/content/early/ |
| | | | | | | | | | 2020/06/19/science. |
| | | | | | | | | | abc6952/tab-pdf) |
| | | | | | | 1A09 | 3280 | ALWYSNH | Wafaa Alsoussi et al., |
| | | | | | | | | WV | 2020 |
| | | | | | | | | | (https://www.jimmunol. |
| | | | | | | | | | org/content/early/ |
| | | | | | | | | | 2020/06/23/jimmunol. |
| | | | | | | | | | 2000583) |
| | | | | | | 1A10 | 3281 | QQGNTLP | Wafaa Alsoussi et al., |
| | | | | | | | | | 2020 |
| | | | | | | | | | (https://www.jimmunol. |
| | | | | | | | | | org/content/early/ |
| | | | | | | | | | 2020/06/23/jimmunol. |
| | | | | | | | | | 2000583) |
| | | | | | | 1A12 | 3282 | LQYDEFRT | Wafaa Alsoussi et al., |
| | | | | | | | | | 2020 |
| | | | | | | | | | (https://www.jimmunol. |
| | | | | | | | | | org/content/early/ |
| | | | | | | | | | 2020/06/23/jimmunol. |
| | | | | | | | | | 2000583) |
| | | | | | | 1B07 | 3283 | ALWYSNQ | Wafaa Alsoussi et al., |
| | | | | | | | | FI | 2020 |
| | | | | | | | | | (https://www.jimmunol. |
| | | | | | | | | | org/content/early/ |
| | | | | | | | | | 2020/06/23/jimmunol. |
| | | | | | | | | | 2000583) |
| | | | | | | 1610 | 3284 | ALWYSNH | Wafaa Alsoussi et al., |
| | | | | | | | | WV | 2020 |
| | | | | | | | | | (https://www.jimmunol. |
| | | | | | | | | | org/content/early/ |
| | | | | | | | | | 2020/06/23/jimmunol. |
| | | | | | | | | | 2000583) |
| | | | | | | 1C05 | 3285 | QQNNEDP | Wafaa Alsoussi et al., |
| | | | | | | | | LT | 2020 |
| | | | | | | | | | (https://www.jimmunol. |
| | | | | | | | | | org/content/early/ |
| | | | | | | | | | 2020/06/23/jimmunol. |
| | | | | | | | | | 2000583) |
| | | | | | | 1C06 | 3286 | FQGSHVPP | Wafaa Alsoussi et al., |
| | | | | | | | | T | 2020 |
| | | | | | | | | | (https://www.jimmunol. |
| | | | | | | | | | org/content/early/ |
| | | | | | | | | | 2020/06/23/jimmunol. |
| | | | | | | | | | 2000583) |
| | | | | | | 1C07 | 3287 | QQNNEDP | Wafaa Alsoussi et al., |
| | | | | | | | | LT | 2020 |
| | | | | | | | | | (https://www.jimmunol. |
| | | | | | | | | | org/content/early/ |
| | | | | | | | | | 2020/06/23/jimmunol. |
| | | | | | | | | | 2000583) |
| | | | | | | 1D04 | 3288 | LQYDEFRT | Wafaa Alsoussi et al., |
| | | | | | | | | | 2020 |
| | | | | | | | | | (https://www.jimmunol. |
| | | | | | | | | | org/content/early/ |
| | | | | | | | | | 2020/06/23/jimmunol. |
| | | | | | | | | | 2000583) |
| | | | | | | 1D05 | 3289 | ALWYSNQ | Wafaa Alsoussi et al., |
| | | | | | | | | FI | 2020 |
| | | | | | | | | | (https://www.jimmunol. |
| | | | | | | | | | org/content/early/ |
| | | | | | | | | | 2020/06/23/jimmunol. |
| | | | | | | | | | 2000583) |
| | | | | | | 1E02 | 3290 | QQNNEDP | Wafaa Alsoussi et al., |
| | | | | | | | | LT | 2020 |
| | | | | | | | | | (https://www.jimmunol. |
| | | | | | | | | | org/content/early/ |
| | | | | | | | | | 2020/06/23/jimmunol. |
| | | | | | | | | | 2000583) |
| | | | | | | 1E07 | 3291 | QQSRKVP | Wafaa Alsoussi et al., |
| | | | | | | | | WT | 2020 |
| | | | | | | | | | (https://www.jimmunol. |
| | | | | | | | | | org/content/early/ |
| | | | | | | | | | 2020/06/23/jimmunol. |
| | | | | | | | | | 2000583) |
| | | | | | | 1E10 | 3292 | QQWSSNP | Wafaa Alsoussi et al., |
| | | | | | | | | PT | 2020 |
| | | | | | | | | | (https://www.jimmunol. |
| | | | | | | | | | org/content/early/ |
| | | | | | | | | | 2020/06/23/jimmunol. |
| | | | | | | | | | 2000583) |
| | | | | | | 1H06 | 3293 | QQSRKVP | Wafaa Alsoussi et al., |
| | | | | | | | | WT | 2020 |
| | | | | | | | | | (https://www.jimmunol. |
| | | | | | | | | | org/content/early/ |
| | | | | | | | | | 2020/06/23/jimmunol. |
| | | | | | | | | | 2000583) |
| | | | | | | 1H10 | 3294 | ALWYSNH | Wafaa Alsoussi et al., |
| | | | | | | | | WV | 2020 |
| | | | | | | | | | (https://www.jimmunol. |
| | | | | | | | | | org/content/early/ |
| | | | | | | | | | 2020/06/23/jimmunol. |
| | | | | | | | | | 2000583) |
| | | | | | | 1M-1D2 | 3295 | AAWDDSLI | Xiangyang Chi et al., 2020 |
| | | | | | | | | YVL | (https://science.sciencemag. |
| | | | | | | | | | org/content/early/ |
| | | | | | | | | | 2020/06/19/science. |
| | | | | | | | | | abc6952/tab-pdf) |
| | | | | | | 2B04 | 3296 | ALWYNNH | Wafaa Alsoussi et al., |
| | | | | | | | | WV | 2020 |
| | | | | | | | | | (https://www.jimmunol. |
| | | | | | | | | | org/content/early/ |
| | | | | | | | | | 2020/06/23/jimmunol. |
| | | | | | | | | | 2000583) |
| | | | | | | 2C02 | 3297 | QQWSSYP | Wafaa Alsoussi et al., |
| | | | | | | | | LT | 2020 |
| | | | | | | | | | (https://www.jimmunol. |
| | | | | | | | | | org/content/early/ |
| | | | | | | | | | 2020/06/23/jimmunol. |
| | | | | | | | | | 2000583) |
| | | | | | | 2C03 | 3298 | FQGSHVPY | Wafaa Alsoussi et al., |
| | | | | | | | | T | 2020 |
| | | | | | | | | | (https://www.jimmunol. |
| | | | | | | | | | org/content/early/ |
| | | | | | | | | | 2020/06/23/jimmunol. |
| | | | | | | | | | 2000583) |
| | | | | | | 2C04 | 3299 | QQSRKVP | Wafaa Alsoussi et al., |
| | | | | | | | | WT | 2020 |
| | | | | | | | | | (https://www.jimmunol. |
| | | | | | | | | | org/content/early/ |
| | | | | | | | | | 2020/06/23/jimmunol. |
| | | | | | | | | | 2000583) |
| | | | | | | 2D01 | 3300 | QQWSSYP | Wafaa Alsoussi et al., |
| | | | | | | | | LT | 2020 |
| | | | | | | | | | (https://www.jimmunol. |
| | | | | | | | | | org/content/early/ |
| | | | | | | | | | 2020/06/23/jimmunol. |
| | | | | | | | | | 2000583) |
| | | | | | | 2D08 | 3301 | QQSRKVP | Wafaa Alsoussi et al., |
| | | | | | | | | WT | 2020 |
| | | | | | | | | | (https://www.jimmunol. |
| | | | | | | | | | org/content/early/ |
| | | | | | | | | | 2020/06/23/jimmunol. |
| | | | | | | | | | 2000583) |
| | | | | | | 2D11 | 3302 | QQSKEVP | Wafaa Alsoussi et al., |
| | | | | | | | | WT | 2020 |
| | | | | | | | | | (https://www.jimmunol. |
| | | | | | | | | | org/content/early/ |
| | | | | | | | | | 2020/06/23/jimmunol. |
| | | | | | | | | | 2000583) |
| | | | | | | 2E06 | 3303 | QQSNEDP | Wafaa Alsoussi et al., |
| | | | | | | | | | 2020 |
| | | | | | | | | | (https://www.jimmunol. |
| | | | | | | | | | org/content/early/ |
| | | | | | | | | | 2020/06/23/jimmunol. |
| | | | | | | | | | 2000583) |
| | | | | | | 2E10 | 3304 | QQNNEDP | Wafaa Alsoussi et al., |
| | | | | | | | | LT | 2020 |
| | | | | | | | | | (https://www.jimmunol. |
| | | | | | | | | | org/content/early/ |
| | | | | | | | | | 2020/06/23/jimmunol. |
| | | | | | | | | | 2000583) |
| | | | | | | 2F04 | 3305 | QQSSSWP | Wafaa Alsoussi et al., |
| | | | | | | | | LT | 2020 |
| | | | | | | | | | (https://www.jimmunol. |
| | | | | | | | | | org/content/early/ |
| | | | | | | | | | 2020/06/23/jimmunol. |
| | | | | | | | | | 2000583) |
| | | | | | | 2H04 | 3306 | QQSSSWP | Wafaa Alsoussi et al., |
| | | | | | | | | LT | 2020 |
| | | | | | | | | | (https://www.jimmunol. |
| | | | | | | | | | org/content/early/ |
| | | | | | | | | | 2020/06/23/jimmunol. |
| | | | | | | | | | 2000583) |
| | | | | | | 2M- | 3307 | QSYDSSNH | Xiangyang Chi et al., 2020 |
| | | | | | | 10B11 | | WV | (https://science.sciencemag. |
| | | | | | | | | | org/content/early/ |
| | | | | | | | | | 2020/06/19/science.abc6952/ |
| | | | | | | | | | tab-pdf) |
| | | | | | | 2M-12D7 | 3308 | QQSYSTPR | Xiangyang Chi et al., 2020 |
| | | | | | | | | T | (https://science.sciencemag. |
| | | | | | | | | | org/content/early/ |
| | | | | | | | | | 2020/06/19/science.abc6952/ |
| | | | | | | | | | tab-pdf) |
| | | | | | | 2M-13A3 | 3309 | QQYYSTPF | Xiangyang Chi et al., 2020 |
| | | | | | | | | T | (https://science.sciencemag. |
| | | | | | | | | | org/content/early/ |
| | | | | | | | | | 2020/06/19/science.abc6952/ |
| | | | | | | | | | tab-pdf) |
| | | | | | | 2M- | 3310 | QQYGSSRS | Xiangyang Chi et al., 2020 |
| | | | | | | 13D11 | | WT | (https://science.sciencemag. |
| | | | | | | | | | org/content/early/ |
| | | | | | | | | | 2020/06/19/science.abc6952/ |
| | | | | | | | | | tab-pdf) |
| | | | | | | 2M-14B2 | 3311 | QQSYSTFT | Xiangyang Chi et al., 2020 |
| | | | | | | | | LYT | (https://science.sciencemag. |
| | | | | | | | | | org/content/early/ |
| | | | | | | | | | 2020/06/19/science.abc6952/ |
| | | | | | | | | | tab-pdf) |
| | | | | | | 2M-14E4 | 3312 | QQSHSFPF | Xiangyang Chi et al., 2020 |
| | | | | | | | | T | (https://science.sciencemag. |
| | | | | | | | | | org/content/early/ |
| | | | | | | | | | 2020/06/19/science.abc6952/ |
| | | | | | | | | | tab-pdf) |
| | | | | | | 2M-14E5 | 3313 | QQLNSYVT | Xiangyang Chi et al., 2020 |
| | | | | | | | | | (https://science.sciencemag. |
| | | | | | | | | | org/content/early/ |
| | | | | | | | | | 2020/06/19/science.abc6952/ |
| | | | | | | | | | tab-pdf) |
| | | | | | | 2M-2D1 | 3314 | AARDDSLS | Xiangyang Chi et al., 2020 |
| | | | | | | | | GWV | (https://science.sciencemag. |
| | | | | | | | | | org/content/early/ |
| | | | | | | | | | 2020/06/19/science.abc6952/ |
| | | | | | | | | | tab-pdf) |
| | | | | | | 2M-2D4 | 3315 | QQRTNWP | Xiangyang Chi et al., 2020 |
| | | | | | | | | L | (https://science.sciencemag. |
| | | | | | | | | | org/content/early/ |
| | | | | | | | | | 2020/06/19/science.abc6952/ |
| | | | | | | | | | tab-pdf) |
| | | | | | | 2M-2G12 | 3316 | QQNYSTW | Xiangyang Chi et al., 2020 |
| | | | | | | | | T | (https://science.sciencemag. |
| | | | | | | | | | org/content/early/ |
| | | | | | | | | | 2020/06/19/science.abc6952/ |
| | | | | | | | | | tab-pdf) |
| | | | | | | 2M-4G4 | 3317 | CSYAVSST | Xiangyang Chi et al., 2020 |
| | | | | | | | | WV | (https://science.sciencemag. |
| | | | | | | | | | org/content/early/ |
| | | | | | | | | | 2020/06/19/science.abc6952/ |
| | | | | | | | | | tab-pdf) |
| | | | | | | 2M-7E9 | 3318 | QQRSNWP | Xiangyang Chi et al., 2020 |
| | | | | | | | | PAFT | (https://science.sciencemag. |
| | | | | | | | | | org/content/early/ |
| | | | | | | | | | 2020/06/19/science.abc6952/ |
| | | | | | | | | | tab-pdf) |
| | | | | | | 2M-8E7 | 3319 | QQRSNWP | Xiangyang Chi et al., 2020 |
| | | | | | | | | PKIT | (https://science.sciencemag. |
| | | | | | | | | | org/content/early/ |
| | | | | | | | | | 2020/06/19/science.abc6952/ |
| | | | | | | | | | tab-pdf) |
| | | | | | | 2M-8H10 | 3320 | QQYYNNQ | Xiangyang Chi et al., 2020 |
| | | | | | | | | WT | (https://science.sciencemag. |
| | | | | | | | | | org/content/early/ |
| | | | | | | | | | 2020/06/19/science.abc6952/ |
| | | | | | | | | | tab-pdf) |
| | | | | | | 2M-9F10 | 3321 | QQSFVSPR | Xiangyang Chi et al., 2020 |
| | | | | | | | | T | (https://science.sciencemag. |
| | | | | | | | | | org/content/early/ |
| | | | | | | | | | 2020/06/19/science.abc6952/ |
| | | | | | | | | | tab-pdf) |
| | | | | | | 2M-9H1 | 3322 | LQHKSYPL | Xiangyang Chi et al., 2020 |
| | | | | | | | | T | (https://science.sciencemag. |
| | | | | | | | | | org/content/early/ |
| | | | | | | | | | 2020/06/19/science.abc6952/ |
| | | | | | | | | | tab-pdf) |
| +0O | | | | | | | | | |
| | | | | | | 31B5 | | ND | Xiangyu Chen et al., |
| | | | | | | | | | 2020 |
| | | | | | | | | | (https://www.nature.com/ |
| | | | | | | | | | articles/s41423-020- |
| | | | | | | | | | 0426-7) |
| | | | | | | 31B9 | | ND | Xiangyu Chen et al., |
| | | | | | | | | | 2020 |
| | | | | | | | | | (https://www.nature.com/ |
| | | | | | | | | | articles/s41423-020- |
| | | | | | | | | | 0426-7) |
| | | | | | | 32D4 | | ND | Xiangyu Chen et al., |
| | | | | | | | | | 2020 |
| | | | | | | | | | (https://www.nature.com/ |
| | | | | | | | | | articles/s41423-020- |
| | | | | | | | | | 0426-7) |
| | | | | | | 413-2 | 3323 | QQYGSSPP | Jinkai Wan et al., 2020 |
| | | | | | | | | LT | (https://www.sciencedirect. |
| | | | | | | | | | com/science/article/ |
| | | | | | | | | | pii/S2211124720308998) |
| | | | | | | 414-1 | 3324 | AAWDDSL | Jinkai Wan et al., 2020 |
| | | | | | | | | NGW | (https://www.sciencedirect. |
| | | | | | | | | | com/science/article/ |
| | | | | | | | | | pii/S2211124720308998) |
| | | | | | | 47D11 | | ND | Chunyan Wang et al., |
| | | | | | | | | | 2020 |
| | | | | | | | | | (https://www.nature.com/ |
| | | | | | | | | | articles/s41467-020- |
| | | | | | | | | | 16256-y) |
| | | | | | | 4A8 | 3325 | TQATQFPY | Xiangyang Chi et al., 2020 |
| | | | | | | | | T | (https://science.sciencemag. |
| | | | | | | | | | org/content/early/ |
| | | | | | | | | | 2020/06/19/science.abc6952/ |
| | | | | | | | | | tab-pdf) |
| | | | | | | 505-3 | 3326 | MQGTHW | Jinkai Wan et al., 2020 |
| | | | | | | | | PPT | (https://www.sciencedirect. |
| | | | | | | | | | com/science/article/ |
| | | | | | | | | | pii/S2211124720308998) |
| | | | | | | 505-5 | 3327 | MQGTHW | Jinkai Wan et al., 2020 |
| | | | | | | | | PPT | (https://www.sciencedirect. |
| | | | | | | | | | com/science/article/ |
| | | | | | | | | | pii/S2211124720308998) |
| | | | | | | 505-8 | 3328 | SSYTSSSIV | Jinkai Wan et al., 2020 |
| | | | | | | | | V | (https://www.sciencedirect. |
| | | | | | | | | | com/science/article/ |
| | | | | | | | | | pii/S2211124720308998) |
| | | | | | | 515-1 | 3329 | MQGTHW | Jinkai Wan et al., 2020 |
| | | | | | | | | PPT | (https://www.sciencedirect. |
| | | | | | | | | | com/science/article/ |
| | | | | | | | | | pii/S2211124720308998) |
| | | | | | | 515-5 | 3330 | LQHNSYPI | Jinkai Wan et al., 2020 |
| | | | | | | | | T | (https://www.sciencedirect. |
| | | | | | | | | | com/science/article/ |
| | | | | | | | | | pii/S2211124720308998) |
| | | | | | | 553-15 | 3331 | QSYDGSN | Jinkai Wan et al., 2020 |
| | | | | | | | | HNVV | (https://www.sciencedirect. |
| | | | | | | | | | com/science/article/ |
| | | | | | | | | | pii/S2211124720308998) |
| | | | | | | 553-49 | 3332 | QSYDSSNH | Jinkai Wan et al., 2020 |
| | | | | | | | | W | (https://www.sciencedirect. |
| | | | | | | | | | com/science/article/ |
| | | | | | | | | | pii/S2211124720308998) |
| | | | | | | 553-60 | 3333 | QQYGSSPP | Jinkai Wan et al., 2020 |
| | | | | | | | | T | (https://www.sciencedirect. |
| | | | | | | | | | com/science/article/ |
| | | | | | | | | | pii/S2211124720308998) |
| | | | | | | 553-63 | 3334 | QQSYSIPR | Jinkai Wan et al., 2020 |
| | | | | | | | | T | (https://www.sciencedirect. |
| | | | | | | | | | com/science/article/ |
| | | | | | | | | | pii/S2211124720308998) |
| | | | | | | 8D2 | 3335 | LQHNSYPL | Xiangyang Chi et al., 2020 |
| | | | | | | | | T | (https://science.sciencemag. |
| | | | | | | | | | org/content/early/ |
| | | | | | | | | | 2020/06/19/science.abc |
| | | | | | | | | | 6952/tab-pdf) |
| | | | | | | 8D9 | 3336 | QAWDSST | Xiangyang Chi et al., 2020 |
| | | | | | | | | GV | (https://science.sciencemag. |
| | | | | | | | | | org/content/early/ |
| | | | | | | | | | 2020/06/19/science.abc |
| | | | | | | | | | 6952/tab-pdf) |
| | | | | | | 9A1 | 3337 | HQYSKWP | Xiangyang Chi et al., 2020 |
| | | | | | | | | VT | (https://science.sciencemag. |
| | | | | | | | | | org/content/early/ |
| | | | | | | | | | 2020/06/19/science.abc |
| | | | | | | | | | 6952/tab-pdf) |
| | | | | | | Ab_510A | 3338 | MQALQM | Xiaojian Han et al., 2020 |
| | | | | | | | | GT | (https://www.biorxiv. |
| | | | | | | | | | org/content/10.1101/ |
| | | | | | | | | | 2020.08.19.253369v2.full. |
| | | | | | | | | | pdf + html) |
| | | | | | | Ab_510A5 | 3339 | QQSYSTPP | Xiaojian Han et al., 2020 |
| | | | | | | | | | (https://www.biorxiv. |
| | | | | | | | | | org/content/10.1101/ |
| | | | | | | | | | 2020.08.19.253369v2.full. |
| | | | | | | | | | pdf + html) |
| | | | | | | Ab_510D7 | 3340 | QQYGSSRT | Xiaojian Han et al., 2020 |
| | | | | | | | | | (https://www.biorxiv. |
| | | | | | | | | | org/content/10.1101/ |
| | | | | | | | | | 2020.08.19.253369v2.full. |
| | | | | | | | | | pdf + html) |
| | | | | | | Ab_510G | 3341 | QQYDTLPL | Xiaojian Han et al., 2020 |
| | | | | | | | | T | (https://www.biorxiv. |
| | | | | | | | | | org/content/10.1101/ |
| | | | | | | | | | 2020.08.19.253369v2.full. |
| | | | | | | | | | pdf + html) |
| | | | | | | Ab_510H10 | 3342 | QQSYSTPR | Xiaojian Han et al., 2020 |
| | | | | | | | | T | (https://www.biorxiv. |
| | | | | | | | | | org/content/10.1101/ |
| | | | | | | | | | 2020.08.19.253369v2.full. |
| | | | | | | | | | pdf + html) |
| | | | | | | Ab_510H2 | 3343 | QQLNSYPR | Xiaojian Han et al., 2020 |
| | | | | | | | | MT | (https://www.biorxiv. |
| | | | | | | | | | org/content/10.1101/ |
| | | | | | | | | | 2020.08.19.253369v2.full. |
| | | | | | | | | | pdf + html) |
| | | | | | | Ab_510H | 3344 | QQRSNWP | Xiaojian Han et al., 2020 |
| | | | | | | | | GT | (https://www.biorxiv. |
| | | | | | | | | | org/content/10.1101/ |
| | | | | | | | | | 2020.08.19.253369v2.full. |
| | | | | | | | | | pdf + html) |
| | | | | | | Ab_510H7 | 3345 | QQFNNFLL | Xiaojian Han et al., 2020 |
| | | | | | | | | T | (https://www.biorxiv. |
| | | | | | | | | | org/content/10.1101/ |
| | | | | | | | | | 2020.08.19.253369v2.full. |
| | | | | | | | | | pdf + html) |
| | | | | | | Ab_511A1 | 3346 | QQYNNWP | Xiaojian Han et al., 2020 |
| | | | | | | | | PWT | (https://www.biorxiv. |
| | | | | | | | | | org/content/10.1101/ |
| | | | | | | | | | 2020.08.19.253369v2.full. |
| | | | | | | | | | pdf + html) |
| | | | | | | Ab_511A5 | 3347 | QVWDSSA | Xiaojian Han et al., 2020 |
| | | | | | | | | DHYV | (https://www.biorxiv. |
| | | | | | | | | | org/content/10.1101/ |
| | | | | | | | | | 2020.08.19.253369v2.full. |
| | | | | | | | | | pdf + html) |
| | | | | | | Ab_511B11 | 3348 | QSYDRSLS | Xiaojian Han et al., 2020 |
| | | | | | | | | VLYV | (https://www.biorxiv. |
| | | | | | | | | | org/content/10.1101/ |
| | | | | | | | | | 2020.08.19.253369v2.full. |
| | | | | | | | | | pdf + html) |
| | | | | | | Ab_511B | 3349 | QQANSFRL | Xiaojian Han et al., 2020 |
| | | | | | | | | T | (https://www.biorxiv. |
| | | | | | | | | | org/content/10.1101/ |
| | | | | | | | | | 2020.08.19.253369v2.full. |
| | | | | | | | | | pdf + html) |
| | | | | | | Ab_511D11 | 3350 | QQYGRSPY | Xiaojian Han et al., 2020 |
| | | | | | | | | T | (https://www.biorxiv. |
| | | | | | | | | | org/content/10.1101/ |
| | | | | | | | | | 2020.08.19.253369v2.full. |
| | | | | | | | | | pdf + html) |
| | | | | | | Ab_511E5 | 3351 | NSRDSSGN | Xiaojian Han et al., 2020 |
| | | | | | | | | TVV | (https://www.biorxiv. |
| | | | | | | | | | org/content/10.1101/ |
| | | | | | | | | | 2020.08.19.253369v2.full. |
| | | | | | | | | | pdf + html) |
| | | | | | | Ab_511E7 | 3352 | QQYHNLPI | Xiaojian Han et al., 2020 |
| | | | | | | | | T | (https://www.biorxiv. |
| | | | | | | | | | org/content/10.1101/ |
| | | | | | | | | | 2020.08.19.253369v2.full. |
| | | | | | | | | | pdf + html) |
| | | | | | | Ab_511E9 | 3353 | HQSSSLPY | Xiaojian Han et al., 2020 |
| | | | | | | | | T | (https://www.biorxiv. |
| | | | | | | | | | org/content/10.1101/ |
| | | | | | | | | | 2020.08.19.253369v2.full. |
| | | | | | | | | | pdf + html) |
| | | | | | | Ab_511G5 | 3354 | TTWDASR | Xiaojian Han et al., 2020 |
| | | | | | | | | GGWV | (https://www.biorxiv. |
| | | | | | | | | | org/content/10.1101/ |
| | | | | | | | | | 2020.08.19.253369v2.full. |
| | | | | | | | | | pdf + html) |
| | | | | | | Ab_511G7 | 3355 | QQYHNVP | Xiaojian Han et al., 2020 |
| | | | | | | | | PA | (https://www.biorxiv. |
| | | | | | | | | | org/content/10.1101/ |
| | | | | | | | | | 2020.08.19.253369v2.full. |
| | | | | | | | | | pdf + html) |
| | | | | | | Ab_511H11 | 3356 | QQSYSSPP | Xiaojian Han et al., 2020 |
| | | | | | | | | WT | (https://www.biorxiv. |
| | | | | | | | | | org/content/10.1101/ |
| | | | | | | | | | 2020.08.19.253369v2.full. |
| | | | | | | | | | pdf + html) |
| | | | | | | Ab_511H7 | 3357 | AAWDDSL | Xiaojian Han et al., 2020 |
| | | | | | | | | SGPV | (https://www.biorxiv. |
| | | | | | | | | | org/content/10.1101/ |
| | | | | | | | | | 2020.08.19.253369v2.full. |
| | | | | | | | | | pdf + html) |
| | | | | | | Ab_51A1 | 3358 | QHLNIDPIT | Xiaojian Han et al., 2020 |
| | | | | | | | | | (https://www.biorxiv. |
| | | | | | | | | | org/content/10.1101/ |
| | | | | | | | | | 2020.08.19.253369v2.full. |
| | | | | | | | | | pdf + html) |
| | | | | | | Ab_51A3 | 3359 | QQRGNSIT | Xiaojian Han et al., 2020 |
| | | | | | | | | | (https://www.biorxiv. |
| | | | | | | | | | org/content/10.1101/ |
| | | | | | | | | | 2020.08.19.253369v2.full. |
| | | | | | | | | | pdf + html) |
| | | | | | | Ab_51D2 | 3360 | QQSYNTLA | Xiaojian Han et al., 2020 |
| | | | | | | | | LS | (https://www.biorxiv. |
| | | | | | | | | | org/content/10.1101/ |
| | | | | | | | | | 2020.08.19.253369v2.full. |
| | | | | | | | | | pdf + html) |
| | | | | | | Ab_51D3 | 3361 | QQYADLPY | Xiaojian Han et al., 2020 |
| | | | | | | | | T | (https://www.biorxiv. |
| | | | | | | | | | org/content/10.1101/ |
| | | | | | | | | | 2020.08.19.253369v2.full. |
| | | | | | | | | | pdf + html) |
| | | | | | | Ab_51D4 | 3362 | QQSYSPPH | Xiaojian Han et al., 2020 |
| | | | | | | | | S | (https://www.biorxiv. |
| | | | | | | | | | org/content/10.1101/ |
| | | | | | | | | | 2020.08.19.253369v2.full. |
| | | | | | | | | | pdf + html) |
| | | | | | | Ab_51D7 | 3363 | QQSYSTPC | Xiaojian Han et al., 2020 |
| | | | | | | | | T | (https://www.biorxiv. |
| | | | | | | | | | org/content/10.1101/ |
| | | | | | | | | | 2020.08.19.253369v2.full. |
| | | | | | | | | | pdf + html) |
| | | | | | | Ab_51E10 | 3364 | QQYYITPQ | Xiaojian Han et al., 2020 |
| | | | | | | | | LT | (https://www.biorxiv. |
| | | | | | | | | | org/content/10.1101/ |
| | | | | | | | | | 2020.08.19.253369v2.full. |
| | | | | | | | | | pdf + html) |
| | | | | | | Ab_51E12 | 3365 | QQYYGYPT | Xiaojian Han et al., 2020 |
| | | | | | | | | | (https://www.biorxiv. |
| | | | | | | | | | org/content/10.1101/ |
| | | | | | | | | | 2020.08.19.253369v2.full. |
| | | | | | | | | | pdf + html) |
| | | | | | | Ab_51E7 | 3366 | QQSYSAPP | Xiaojian Han et al., 2020 |
| | | | | | | | | WT | (https://www.biorxiv. |
| | | | | | | | | | org/content/10.1101/ |
| | | | | | | | | | 2020.08.19.253369v2.full. |
| | | | | | | | | | pdf + html) |
| | | | | | | Ab_51F11 | 3367 | QQYGSSRT | Xiaojian Han et al., 2020 |
| | | | | | | | | | (https://www.biorxiv. |
| | | | | | | | | | org/content/10.1101/ |
| | | | | | | | | | 2020.08.19.253369v2.full. |
| | | | | | | | | | pdf + html) |
| | | | | | | Ab_52C1 | 3368 | QSYDSSLS | Xiaojian Han et al., 2020 |
| | | | | | | | | GSWV | (https://www.biorxiv. |
| | | | | | | | | | org/content/10.1101/ |
| | | | | | | | | | 2020.08.19.253369v2.full. |
| | | | | | | | | | pdf + html) |
| | | | | | | Ab_52C6 | 3369 | VLYMGSGI | Xiaojian Han et al., 2020 |
| | | | | | | | | W | (https://www.biorxiv. |
| | | | | | | | | | org/content/10.1101/ |
| | | | | | | | | | 2020.08.19.253369v2.full. |
| | | | | | | | | | pdf + html) |
| | | | | | | Ab_52F7 | 3370 | MQGTHW | Xiaojian Han et al., 2020 |
| | | | | | | | | PPGT | (https://www.biorxiv. |
| | | | | | | | | | org/content/10.1101/ |
| | | | | | | | | | 2020.08.19.253369v2.full. |
| | | | | | | | | | pdf + html) |
| | | | | | | Ab_52G9 | 3371 | QQYDNLP | Xiaojian Han et al., 2020 |
| | | | | | | | | RT | (https://www.biorxiv. |
| | | | | | | | | | org/content/10.1101/ |
| | | | | | | | | | 2020.08.19.253369v2.full. |
| | | | | | | | | | pdf + html) |
| | | | | | | Ab_53C10 | 3372 | QVWDSSS | Xiaojian Han et al., 2020 |
| | | | | | | | | DPYV | (https://www.biorxiv. |
| | | | | | | | | | org/content/10.1101/ |
| | | | | | | | | | 2020.08.19.253369v2.full. |
| | | | | | | | | | pdf + html) |
| | | | | | | Ab_53C5 | 3373 | QQYNNLYT | Xiaojian Han et al., 2020 |
| | | | | | | | | | (https://www.biorxiv. |
| | | | | | | | | | org/content/10.1101/ |
| | | | | | | | | | 2020.08.19.253369v2.full. |
| | | | | | | | | | pdf + html) |
| | | | | | | Ab_53F12 | 3374 | QHYNNWP | Xiaojian Han et al., 2020 |
| | | | | | | | | LYT | (https://www.biorxiv. |
| | | | | | | | | | org/content/10.1101/ |
| | | | | | | | | | 2020.08.19.253369v2.full. |
| | | | | | | | | | pdf + html) |
| | | | | | | Ab_53F9 | 3375 | MQGTHW | Xiaojian Han et al., 2020 |
| | | | | | | | | PPGT | (https://www.biorxiv. |
| | | | | | | | | | org/content/10.1101/ |
| | | | | | | | | | 2020.08.19.253369v2.full. |
| | | | | | | | | | pdf + html) |
| | | | | | | Ab_53H3 | 3376 | QQYDNLPL | Xiaojian Han et al., 2020 |
| | | | | | | | | T | (https://www.biorxiv. |
| | | | | | | | | | org/content/10.1101/ |
| | | | | | | | | | 2020.08.19.253369v2.full. |
| | | | | | | | | | pdf + html) |
| | | | | | | Ab_55A8 | 3377 | QQYNSYSH | Xiaojian Han et al., 2020 |
| | | | | | | | | T | (https://www.biorxiv. |
| | | | | | | | | | org/content/10.1101/ |
| | | | | | | | | | 2020.08.19.253369v2.full. |
| | | | | | | | | | pdf + html) |
| | | | | | | Ab_55C9 | 3378 | QQSYSTPP | Xiaojian Han et al., 2020 |
| | | | | | | | | YT | (https://www.biorxiv. |
| | | | | | | | | | org/content/10.1101/ |
| | | | | | | | | | 2020.08.19.253369v2.full. |
| | | | | | | | | | pdf + html) |
| | | | | | | Ab_56C12 | 3379 | QQTYSTPR | Xiaojian Han et al., 2020 |
| | | | | | | | | T | (https://www.biorxiv. |
| | | | | | | | | | org/content/10.1101/ |
| | | | | | | | | | 2020.08.19.253369v2.full. |
| | | | | | | | | | pdf + html) |
| | | | | | | Ab_56D7 | 3380 | QQLNSYPP | Xiaojian Han et al., 2020 |
| | | | | | | | | IT | (https://www.biorxiv. |
| | | | | | | | | | org/content/10.1101/ |
| | | | | | | | | | 2020.08.19.253369v2.full. |
| | | | | | | | | | pdf + html) |
| | | | | | | Ab_56E1 | 3381 | AAWDDSL | Xiaojian Han et al., 2020 |
| | | | | | | | | NGWV | (https://www.biorxiv. |
| | | | | | | | | | org/content/10.1101/ |
| | | | | | | | | | 2020.08.19.253369v2.full. |
| | | | | | | | | | pdf + html) |
| | | | | | | Ab_56H11 | 3382 | ATWDDSL | Xiaojian Han et al., 2020 |
| | | | | | | | | NGRV | (https://www.biorxiv. |
| | | | | | | | | | org/content/10.1101/ |
| | | | | | | | | | 2020.08.19.253369v2.full. |
| | | | | | | | | | pdf + html) |
| | | | | | | Ab_56H3 | 3383 | QQYGSSPR | Xiaojian Han et al., 2020 |
| | | | | | | | | T | (https://www.biorxiv. |
| | | | | | | | | | org/content/10.1101/ |
| | | | | | | | | | 2020.08.19.253369v2.full. |
| | | | | | | | | | pdf + html) |
| | | | | | | Ab_57A6 | 3384 | NSRDSSGN | Xiaojian Han et al., 2020 |
| | | | | | | | | HWV | (https://www.biorxiv. |
| | | | | | | | | | org/content/10.1101/ |
| | | | | | | | | | 2020.08.19.253369v2.full. |
| | | | | | | | | | pdf + html) |
| | | | | | | Ab_57A8 | 3385 | QQYNSYSP | Xiaojian Han et al., 2020 |
| | | | | | | | | LT | (https://www.biorxiv. |
| | | | | | | | | | org/content/10.1101/ |
| | | | | | | | | | 2020.08.19.253369v2.full. |
| | | | | | | | | | pdf + html) |
| | | | | | | Ab_57A9 | 3386 | QQYYSFW | Xiaojian Han et al., 2020 |
| | | | | | | | | | (https://www.biorxiv. |
| | | | | | | | | | org/content/10.1101/ |
| | | | | | | | | | 2020.08.19.253369v2.full. |
| | | | | | | | | | pdf + html) |
| | | | | | | Ab_57B8 | 3387 | QLLNTDPI | Xiaojian Han et al., 2020 |
| | | | | | | | | T | (https://www.biorxiv. |
| | | | | | | | | | org/content/10.1101/ |
| | | | | | | | | | 2020.08.19.253369v2.full. |
| | | | | | | | | | pdf + html) |
| | | | | | | Ab_57C4 | 3388 | QQSYSTPL | Xiaojian Han et al., 2020 |
| | | | | | | | | T | (https://www.biorxiv. |
| | | | | | | | | | org/content/10.1101/ |
| | | | | | | | | | 2020.08.19.253369v2.full. |
| | | | | | | | | | pdf + html) |
| | | | | | | Ab_57E11 | 3389 | AAWDDSL | Xiaojian Han et al., 2020 |
| | | | | | | | | NGWV | (https://www.biorxiv. |
| | | | | | | | | | org/content/10.1101/ |
| | | | | | | | | | 2020.08.19.253369v2.full. |
| | | | | | | | | | pdf + html) |
| | | | | | | Ab_57F7 | 3390 | AVWDDSL | Xiaojian Han et al., 2020 |
| | | | | | | | | NGWV | (https://www.biorxiv. |
| | | | | | | | | | org/content/10.1101/ |
| | | | | | | | | | 2020.08.19.253369v2.full. |
| | | | | | | | | | pdf + html) |
| | | | | | | Ab_57G9 | 3391 | QQSYSIPR | Xiaojian Han et al., 2020 |
| | | | | | | | | T | (https://www.biorxiv. |
| | | | | | | | | | org/content/10.1101/ |
| | | | | | | | | | 2020.08.19.253369v2.full. |
| | | | | | | | | | pdf + html) |
| | | | | | | Ab_58A4 | 3392 | QQYGSSP | Xiaojian Han et al., 2020 |
| | | | | | | | | WT | (https://www.biorxiv. |
| | | | | | | | | | org/content/10.1101/ |
| | | | | | | | | | 2020.08.19.253369v2.full. |
| | | | | | | | | | pdf + html) |
| | | | | | | Ab_58D2 | 3393 | QQLGT | Xiaojian Han et al., 2020 |
| | | | | | | | | | (https://www.biorxiv. |
| | | | | | | | | | org/content/10.1101/ |
| | | | | | | | | | 2020.08.19.253369v2.full. |
| | | | | | | | | | pdf + html) |
| | | | | | | Ab_58G1 | 3394 | QQTNSFPT | Xiaojian Han et al., 2020 |
| | | | | | | | | | (https://www.biorxiv. |
| | | | | | | | | | org/content/10.1101/ |
| | | | | | | | | | 2020.08.19.253369v2.full. |
| | | | | | | | | | pdf + html) |
| | | | | | | Ab_58G6 | 3395 | QQYDNSP | Xiaojian Han et al., 2020 |
| | | | | | | | | WT | (https://www.biorxiv. |
| | | | | | | | | | org/content/10.1101/ |
| | | | | | | | | | 2020.08.19.253369v2.full. |
| | | | | | | | | | pdf + html) |
| | | | | | | Ab_59A2 | 3396 | QQSDNVP | Xiaojian Han et al., 2020 |
| | | | | | | | | VT | (https://www.biorxiv. |
| | | | | | | | | | org/content/10.1101/ |
| | | | | | | | | | 2020.08.19.253369v2.full. |
| | | | | | | | | | pdf + html) |
| | | | | | | Ab_59D6 | 3397 | QSYDSALV | Xiaojian Han et al., 2020 |
| | | | | | | | | V | (https://www.biorxiv. |
| | | | | | | | | | org/content/10.1101/ |
| | | | | | | | | | 2020.08.19.253369v2.full. |
| | | | | | | | | | pdf + html) |
| | | | | | | Ab_81A11 | 3398 | QSYDSSLS | Xiaojian Han et al., 2020 |
| | | | | | | | | VW | (https://www.biorxiv. |
| | | | | | | | | | org/content/10.1101/ |
| | | | | | | | | | 2020.08.19.253369v2.full. |
| | | | | | | | | | pdf + html) |
| | | | | | | Ab_81C3 | 3399 | SSFTSSSTP | Xiaojian Han et al., 2020 |
| | | | | | | | | YV | (https://www.biorxiv. |
| | | | | | | | | | org/content/10.1101/ |
| | | | | | | | | | 2020.08.19.253369v2.full. |
| | | | | | | | | | pdf + html) |
| | | | | | | Ab_81C7 | 3400 | AAWDDSL | Xiaojian Han et al., 2020 |
| | | | | | | | | NGPV | (https://www.biorxiv. |
| | | | | | | | | | org/content/10.1101/ |
| | | | | | | | | | 2020.08.19.253369v2.full. |
| | | | | | | | | | pdf + html) |
| | | | | | | Ab_81C8 | 3401 | QQSYNTPP | Xiaojian Han et al., 2020 |
| | | | | | | | | WT | (https://www.biorxiv. |
| | | | | | | | | | org/content/10.1101/ |
| | | | | | | | | | 2020.08.19.253369v2.full. |
| | | | | | | | | | pdf + html) |
| | | | | | | Ab_81E1 | 3402 | AAWDDSL | Xiaojian Han et al., 2020 |
| | | | | | | | | SRW | (https://www.biorxiv. |
| | | | | | | | | | org/content/10.1101/ |
| | | | | | | | | | 2020.08.19.253369v2.full. |
| | | | | | | | | | pdf + html) |
| | | | | | | Ab_81E10 | 3403 | AAWDDSL | Xiaojian Han et al., 2020 |
| | | | | | | | | SGVI | (https://www.biorxiv. |
| | | | | | | | | | org/content/10.1101/ |
| | | | | | | | | | 2020.08.19.253369v2.full. |
| | | | | | | | | | pdf + html) |
| | | | | | | Ab_81F2 | 3404 | MQALQTP | Xiaojian Han et al., 2020 |
| | | | | | | | | RT | (https://www.biorxiv. |
| | | | | | | | | | org/content/10.1101/ |
| | | | | | | | | | 2020.08.19.253369v2.full. |
| | | | | | | | | | pdf + html) |
| | | | | | | Ab_82B6 | 3405 | CMQGTH | Xiaojian Han et al., 2020 |
| | | | | | | | | WPPT | (https://www.biorxiv. |
| | | | | | | | | | org/content/10.1101/ |
| | | | | | | | | | 2020.08.19.253369v2.full. |
| | | | | | | | | | pdf + html) |
| | | | | | | Ab_82C6 | 3406 | MQGTHW | Xiaojian Han et al., 2020 |
| | | | | | | | | PMYT | (https://www.biorxiv. |
| | | | | | | | | | org/content/10.1101/ |
| | | | | | | | | | 2020.08.19.253369v2.full. |
| | | | | | | | | | pdf + html) |
| | | | | | | Ab_82F6 | 3407 | QQHDNVP | Xiaojian Han et al., 2020 |
| | | | | | | | | LT | (https://www.biorxiv. |
| | | | | | | | | | org/content/10.1101/ |
| | | | | | | | | | 2020.08.19.253369v2.full. |
| | | | | | | | | | pdf + html) |
| | | | | | | Acharya | | Various | Priyamvada Acharya et |
| | | | | | | et al., | | | al., 2020 |
| | | | | | | 2020 | | | (https://www.biorxiv.or |
| | | | | | | | | | g/content/10.1101/ |
| | | | | | | | | | 2020.06.30.178897v1); Wilton |
| | | | | | | | | | Williams et al., 2020 |
| | | | | | | | | | (https://www.biorxiv. |
| | | | | | | | | | org/content/10.1101/ |
| | | | | | | | | | 2020.06.30.178921V1) |
| | | | | | | B38 | 3408 | QQLNSYPP | Yan Wu et al., 2020 |
| | | | | | | | | | (https://science.sciencemag. |
| | | | | | | | | | org/content/early/ |
| | | | | | | | | | 2020/05/12/science.abc2241) |
| | | | | | | BD-236 | | ND | Shuo Du et al., 2020 |
| | | | | | | | | | (https://www.biorxiv. |
| | | | | | | | | | org/content/10.1101/ |
| | | | | | | | | | 2020.07.09.195263v1) |
| | | | | | | BD-368-2 | | ND | Shuo Du et al., 2020 |
| | | | | | | | | | (https://www.biorxiv. |
| | | | | | | | | | org/content/10.1101/ |
| | | | | | | | | | 2020.07.09.195263v1) |
| | | | | | | BD-494 | 3409 | QQLNSYPF | Yunlong Cao et al., 2020 |
| | | | | | | | | T | (https://www.sciencedirect. |
| | | | | | | | | | com/science/article/ |
| | | | | | | | | | pii/S0092867420306206) |
| | | | | | | BD-498 | 3410 | QQLNSYPL | Yunlong Cao et al., 2020 |
| | | | | | | | | T | (https://www.sciencedirect. |
| | | | | | | | | | com/science/article/ |
| | | | | | | | | | pii/S0092867420306206) |
| | | | | | | BD-500 | 3411 | QQSYSTPP | Yunlong Cao et al., 2020 |
| | | | | | | | | DT | (https://www.sciencedirect. |
| | | | | | | | | | com/science/article/ |
| | | | | | | | | | pii/S0092867420306206) |
| | | | | | | BD-503 | 3412 | QQSYTTPL | Yunlong Cao et al., 2020 |
| | | | | | | | | | (https://www.sciencedirect. |
| | | | | | | | | | com/science/article/ |
| | | | | | | | | | pii/S0092867420306206) |
| | | | | | | BD-504 | 3413 | QQSYTTPL | Yunlong Cao et al., 2020 |
| | | | | | | | | | (https://www.sciencedirect. |
| | | | | | | | | | com/science/article/ |
| | | | | | | | | | pii/S0092867420306206) |
| | | | | | | BD-505 | 3414 | HQYDNLPP | Yunlong Cao et al., 2020 |
| | | | | | | | | T | (https://www.sciencedirect. |
| | | | | | | | | | com/science/article/ |
| | | | | | | | | | pii/S0092867420306206) |
| | | | | | | BD-506 | 3415 | QQLNSYPL | Yunlong Cao et al., 2020 |
| | | | | | | | | T | (https://www.sciencedirect. |
| | | | | | | | | | com/science/article/ |
| | | | | | | | | | pii/S0092867420306206) |
| | | | | | | BD-507 | 3416 | QQLNSNP | Yunlong Cao et al., 2020 |
| | | | | | | | | PIT | (https://www.sciencedirect. |
| | | | | | | | | | com/science/article/ |
| | | | | | | | | | pii/S0092867420306206) |
| | | | | | | BD-508 | 3417 | QQSYSTPP | Yunlong Cao et al., 2020 |
| | | | | | | | | | (https://www.sciencedirect. |
| | | | | | | | | | com/science/article/ |
| | | | | | | | | | pii/S0092867420306206) |
| | | | | | | BD-515 | | ND | Yunlong Cao et al., 2020 |
| | | | | | | | | | (https://www.sciencedirect. |
| | | | | | | | | | com/science/article/ |
| | | | | | | | | | pii/S0092867420306206) |
| | | | | | | BD-604 | | ND | Shuo Du et al., 2020 |
| | | | | | | | | | (https://www.biorxiv.or |
| | | | | | | | | | g/content/10.1101/ |
| | | | | | | | | | 2020.07.09.195263vl) |
| | | | | | | BD-629 | | ND | Shuo Du et al., 2020 |
| | | | | | | | | | (https://www.biorxiv.or |
| | | | | | | | | | g/content/10.1101/ |
| | | | | | | | | | 2020.07.09.195263V1) |
| | | | | | | BD23 | 3418 | QQYNSYPY | Yunlong Cao et al., 2020 |
| | | | | | | | | T | (https://www.sciencedirect. |
| | | | | | | | | | com/science/article/ |
| | | | | | | | | | pii/S0092867420306206) |
| | | | | | | Bertoglio | | Various | Federico Bertoglio et |
| | | | | | | et al., | | | al., 2020 |
| | | | | | | 2020 | | | (https://www.biorxiv. |
| | | | | | | | | | org/content/10.1101/ |
| | | | | | | | | | 2020.06.05.135921V1) |
| | | | | | | C002 | 3419 | QQSYSTPR | Davide Robbiani et al., |
| | | | | | | | | T | 2020 |
| | | | | | | | | | (https://www.nature.com/ |
| | | | | | | | | | articles/s41586-020- |
| | | | | | | | | | 2456-9) |
| | | | | | | C003 | 3420 | QQYGSSPR | Davide Robbiani et al., |
| | | | | | | | | T | 2020 |
| | | | | | | | | | (https://www.nature.com/ |
| | | | | | | | | | articles/s41586-020- |
| | | | | | | | | | 2456-9) |
| | | | | | | C004 | 3421 | QQYDNLPI | Davide Robbiani et al., |
| | | | | | | | | T | 2020 |
| | | | | | | | | | (https://www.nature.com/ |
| | | | | | | | | | articles/s41586-020- |
| | | | | | | | | | 2456-9) |
| | | | | | | C005 | 3422 | QQYGSSP | Davide Robbiani et al., |
| | | | | | | | | WT | 2020 |
| | | | | | | | | | (https://www.nature.com/ |
| | | | | | | | | | articles/s41586-020- |
| | | | | | | | | | 2456-9) |
| | | | | | | C006 | 3423 | AAWDDSL | Davide Robbiani et al., |
| | | | | | | | | NGPV | 2020 |
| | | | | | | | | | (https://www.nature.com/ |
| | | | | | | | | | articles/s41586-020- |
| | | | | | | | | | 2456-9) |
| | | | | | | C008 | 3424 | QQYNSYW | Davide Robbiani et al., |
| | | | | | | | | T | 2020 |
| | | | | | | | | | (https://www.nature.com/ |
| | | | | | | | | | articles/s41586-020- |
| | | | | | | | | | 2456-9) |
| | | | | | | C009 | 3425 | SSDAGSNN | Davide Robbiani et al., |
| | | | | | | | | W | 2020 |
| | | | | | | | | | (https://www.nature.com/ |
| | | | | | | | | | articles/s41586-020- |
| | | | | | | | | | 2456-9) |
| | | | | | | C010 | 3426 | QQSYSTPP | Davide Robbiani et al., |
| | | | | | | | | WT | 2020 |
| | | | | | | | | | (https://www.nature.com/ |
| | | | | | | | | | articles/s41586-020- |
| | | | | | | | | | 2456-9) |
| | | | | | | C013 | 3427 | QQRSNWP | Davide Robbiani et al., |
| | | | | | | | | LT | 2020 |
| | | | | | | | | | (https://www.nature.com/ |
| | | | | | | | | | articles/s41586-020- |
| | | | | | | | | | 2456-9) |
| | | | | | | C016 | 3428 | QQYDNLP | Davide Robbiani et al., |
| | | | | | | | | PT | 2020 |
| | | | | | | | | | (https://www.nature.com/ |
| | | | | | | | | | articles/s41586-020- |
| | | | | | | | | | 2456-9) |
| | | | | | | C017 | 3429 | QQRIT | Davide Robbiani et al., |
| | | | | | | | | | 2020 |
| | | | | | | | | | (https://www.nature.com/ |
| | | | | | | | | | articles/s41586-020- |
| | | | | | | | | | 2456-9) |
| | | | | | | C018 | 3430 | QQSYSTPP | Davide Robbiani et al., |
| | | | | | | | | AT | 2020 |
| | | | | | | | | | (https://www.nature.com/ |
| | | | | | | | | | articles/s41586-020- |
| | | | | | | | | | 2456-9) |
| | | | | | | C019 | 3431 | QVWDSSS | Davide Robbiani et al., |
| | | | | | | | | DHVV | 2020 |
| | | | | | | | | | (https://www.nature.com/ |
| | | | | | | | | | articles/s41586-020- |
| | | | | | | | | | 2456-9) |
| | | | | | | C021 | 3432 | MQALQTP | Davide Robbiani et al., |
| | | | | | | | | | 2020 |
| | | | | | | | | | (https://www.nature.com/ |
| | | | | | | | | | articles/s41586-020- |
| | | | | | | | | | 2456-9) |
| | | | | | | C022 | 3433 | QQYNNYR | Davide Robbiani et al., |
| | | | | | | | | | 2020 |
| | | | | | | | | | (https://www.nature.com/ |
| | | | | | | | | | articles/s41586-020- |
| | | | | | | | | | 2456-9) |
| | | | | | | C027 | 3434 | QQYNSYST | Davide Robbiani et al., |
| | | | | | | | | | 2020 |
| | | | | | | | | | (https://www.nature.com/ |
| | | | | | | | | | articles/s41586-020- |
| | | | | | | | | | 2456-9) |
| | | | | | | C029 | 3435 | MQALQTP | Davide Robbiani et al., |
| | | | | | | | | HT | 2020 |
| | | | | | | | | | (https://www.nature.com/ |
| | | | | | | | | | articles/s41586-020- |
| | | | | | | | | | 2456-9) |
| | | | | | | C030 | 3436 | QQYNSYST | Davide Robbiani et al., |
| | | | | | | | | | 2020 |
| | | | | | | | | | (https://www.nature.com/ |
| | | | | | | | | | articles/s41586-020- |
| | | | | | | | | | 2456-9) |
| | | | | | | C031 | 3437 | QQSYSTPP | Davide Robbiani et al., |
| | | | | | | | | LT | 2020 |
| | | | | | | | | | (https://www.nature.com/ |
| | | | | | | | | | articles/s41586-020- |
| | | | | | | | | | 2456-9) |
| | | | | | | C101 | 3438 | QQYGSSPR | Davide Robbiani et al., |
| | | | | | | | | T | 2020 |
| | | | | | | | | | (https://www.nature.com/ |
| | | | | | | | | | articles/s41586-020- |
| | | | | | | | | | 2456-9) |
| | | | | | | C102 | 3439 | QQYGSSPR | Davide Robbiani et al., |
| | | | | | | | | T | 2020 |
| | | | | | | | | | (https://www.nature.com/ |
| | | | | | | | | | articles/s41586-020- |
| | | | | | | | | | 2456-9) |
| | | | | | | C103 | 3440 | QQYTTTPR | Davide Robbiani et al., |
| | | | | | | | | T | 2020 |
| | | | | | | | | | (https://www.nature.com/ |
| | | | | | | | | | articles/s41586-020- |
| | | | | | | | | | 2456-9) |
| | | | | | | C104 | 3441 | QQYGTTPR | Davide Robbiani et al., |
| | | | | | | | | T | 2020 |
| | | | | | | | | | (https://www.nature.com/ |
| | | | | | | | | | articles/s41586-020- |
| | | | | | | | | | 2456-9) |
| | | | | | | C105 | 3442 | SSYEGSNN | Davide Robbiani et al., |
| | | | | | | | | FVV | 2020 |
| | | | | | | | | | (https://www.nature.com/ |
| | | | | | | | | | articles/s41586-020- |
| | | | | | | | | | 2456-9); Christopher |
| | | | | | | | | | Barnes et al., 2020 |
| | | | | | | | | | (https://www.sciencedirect. |
| | | | | | | | | | com/science/article/ |
| | | | | | | | | | pii/S0092867420307571) |
| | | | | | | C106 | 3443 | QVWDSSR | Davide Robbiani et al., |
| | | | | | | | | DHVV | 2020 |
| | | | | | | | | | (https://www.nature.com/ |
| | | | | | | | | | articles/s41586-020- |
| | | | | | | | | | 2456-9) |
| | | | | | | C107 | 3444 | AAWDDSL | Davide Robbiani et al., |
| | | | | | | | | SGFW | 2020 |
| | | | | | | | | | (https://www.nature.com/ |
| | | | | | | | | | articles/s41586-020- |
| | | | | | | | | | 2456-9) |
| | | | | | | C108 | 3445 | NSYTSSSTR | Davide Robbiani et al., |
| | | | | | | | | V | 2020 |
| | | | | | | | | | (https://www.nature.com/ |
| | | | | | | | | | articles/s41586-020- |
| | | | | | | | | | 2456-9) |
| | | | | | | C109 | 3446 | SSYAGSNN | Davide Robbiani et al., |
| | | | | | | | | YVV | 2020 |
| | | | | | | | | | (https://www.nature.com/ |
| | | | | | | | | | articles/s41586-020- |
| | | | | | | | | | 2456-9) |
| | | | | | | C110 | 3447 | QQYNSYPY | Davide Robbiani et al., |
| | | | | | | | | T | 2020 |
| | | | | | | | | | (https://www.nature.com/ |
| | | | | | | | | | articles/s41586-020- |
| | | | | | | | | | 2456-9) |
| | | | | | | C111 | 3448 | AAWDDSL | Davide Robbiani et al., |
| | | | | | | | | NGAWV | 2020 |
| | | | | | | | | | (https://www.nature.com/ |
| | | | | | | | | | articles/s41586-020- |
| | | | | | | | | | 2456-9) |
| | | | | | | C112 | 3449 | SSYTSSST | Davide Robbiani et al., |
| | | | | | | | | WV | 2020 |
| | | | | | | | | | (https://www.nature.com/ |
| | | | | | | | | | articles/s41586-020- |
| | | | | | | | | | 2456-9) |
| | | | | | | C113 | 3450 | QQHNSSPL | Davide Robbiani et al., |
| | | | | | | | | T | 2020 |
| | | | | | | | | | (https://www.nature.com/ |
| | | | | | | | | | articles/s41586-020- |
| | | | | | | | | | 2456-9) |
| | | | | | | C114 | 3451 | QSYDSSLY | Davide Robbiani et al., |
| | | | | | | | | AV | 2020 |
| | | | | | | | | | (https://www.nature.com/ |
| | | | | | | | | | articles/s41586-020- |
| | | | | | | | | | 2456-9) |
| | | | | | | C115 | 3452 | MQVLQIPY | Davide Robbiani et al., |
| | | | | | | | | T | 2020 |
| | | | | | | | | | (https://www.nature.com/ |
| | | | | | | | | | articles/s41586-020- |
| | | | | | | | | | 2456-9) |
| | | | | | | C116 | 3453 | QSYDSGN | Davide Robbiani et al., |
| | | | | | | | | HWVV | 2020 |
| | | | | | | | | | (https://www.nature.com/ |
| | | | | | | | | | articles/s41586-020- |
| | | | | | | | | | 2456-9) |
| | | | | | | C117 | 3454 | GAWDSSLS | Davide Robbiani et al., |
| | | | | | | | | AGGVYV | 2020 |
| | | | | | | | | | (https://www.nature.com/ |
| | | | | | | | | | articles/s41586-020- |
| | | | | | | | | | 2456-9) |
| | | | | | | C118 | 3455 | QTWGTGIL | Davide Robbiani et al., |
| | | | | | | | | V | 2020 |
| | | | | | | | | | (https://www.nature.com/ |
| | | | | | | | | | articles/s41586-020- |
| | | | | | | | | | 2456-9) |
| | | | | | | C119 | 3456 | SSYTSSSTS | Davide Robbiani et al., |
| | | | | | | | | W | 2020 |
| | | | | | | | | | (https://www.nature.com/ |
| | | | | | | | | | articles/s41586-020- |
| | | | | | | | | | 2456-9) |
| | | | | | | C120 | 3457 | QQYDNLP | Davide Robbiani et al., |
| | | | | | | | | QT | 2020 |
| | | | | | | | | | (https://www.nature.com/ |
| | | | | | | | | | articles/s41586-020- |
| | | | | | | | | | 2456-9) |
| | | | | | | C121 | 3458 | CSYAGSSTL | Davide Robbiani et al., |
| | | | | | | | | V | 2020 |
| | | | | | | | | | (https://www.nature.com/ |
| | | | | | | | | | articles/s41586-020- |
| | | | | | | | | | 2456-9) |
| | | | | | | C122 | 3459 | QQLNSDSY | Davide Robbiani et al., |
| | | | | | | | | T | 2020 |
| | | | | | | | | | (https://www.nature.com/ |
| | | | | | | | | | articles/s41586-020- |
| | | | | | | | | | 2456-9) |
| | | | | | | C123 | 3460 | QQLNSYPP | Davide Robbiani et al., |
| | | | | | | | | | 2020 |
| | | | | | | | | | (https://www.nature.com/ |
| | | | | | | | | | articles/s41586-020- |
| | | | | | | | | | 2456-9) |
| | | | | | | C124 | 3461 | QQRNNW | Davide Robbiani et al., |
| | | | | | | | | PPEWT | 2020 |
| | | | | | | | | | (https://www.nature.com/ |
| | | | | | | | | | articles/s41586-020- |
| | | | | | | | | | 2456-9) |
| | | | | | | C125 | 3462 | QQYGSSP | Davide Robbiani et al., |
| | | | | | | | | WT | 2020 |
| | | | | | | | | | (https://www.nature.com/ |
| | | | | | | | | | articles/s41586-020- |
| | | | | | | | | | 2456-9) |
| | | | | | | C126 | 3463 | QSYDSSNL | Davide Robbiani et al., |
| | | | | | | | | V | 2020 |
| | | | | | | | | | (https://www.nature.com/ |
| | | | | | | | | | articles/s41586-020- |
| | | | | | | | | | 2456-9) |
| | | | | | | C127 | 3464 | AAWDDSL | Davide Robbiani et al., |
| | | | | | | | | NGW | 2020 |
| | | | | | | | | | (https://www.nature.com/ |
| | | | | | | | | | articles/s41586-020- |
| | | | | | | | | | 2456-9) |
| | | | | | | C128 | 3465 | QQYGSSRA | Davide Robbiani et al., |
| | | | | | | | | LT | 2020 |
| | | | | | | | | | (https://www.nature.com/ |
| | | | | | | | | | articles/s41586-020- |
| | | | | | | | | | 2456-9) |
| | | | | | | C130 | 3466 | QVWDSSS | Davide Robbiani et al., |
| | | | | | | | | DHPGVV | 2020 |
| | | | | | | | | | (https://www.nature.com/ |
| | | | | | | | | | articles/s41586-020- |
| | | | | | | | | | 2456-9) |
| | | | | | | C131 | 3467 | QQYNNWP | Davide Robbiani et al., |
| | | | | | | | | IT | 2020 |
| | | | | | | | | | (https://www.nature.com/ |
| | | | | | | | | | articles/s41586-020- |
| | | | | | | | | | 2456-9) |
| | | | | | | C132 | 3468 | SSYTSSSTL | Davide Robbiani et al., |
| | | | | | | | | L | 2020 |
| | | | | | | | | | (https://www.nature.com/ |
| | | | | | | | | | articles/s41586-020- |
| | | | | | | | | | 2456-9) |
| | | | | | | C133 | 3469 | QQSYSTPP | Davide Robbiani et al., |
| | | | | | | | | WT | 2020 |
| | | | | | | | | | (https://www.nature.com/ |
| | | | | | | | | | articles/s41586-020- |
| | | | | | | | | | 2456-9) |
| | | | | | | C134 | 3470 | QVWDSSS | Davide Robbiani et al., |
| | | | | | | | | DRPGVV | 2020 |
| | | | | | | | | | (https://www.nature.com/ |
| | | | | | | | | | articles/s41586-020- |
| | | | | | | | | | 2456-9) |
| | | | | | | C135 | 3471 | QQYNSYP | Davide Robbiani et al., |
| | | | | | | | | WT | 2020 |
| | | | | | | | | | (https://www.nature.com/ |
| | | | | | | | | | articles/s41586-020- |
| | | | | | | | | | 2456-9) |
| | | | | | | C138 | 3472 | QSYDSSN | Davide Robbiani et al., |
| | | | | | | | | WV | 2020 |
| | | | | | | | | | (https://www.nature.com/ |
| | | | | | | | | | articles/s41586-020- |
| | | | | | | | | | 2456-9) |
| | | | | | | C139 | 3473 | QQYDNLPL | Davide Robbiani et al., |
| | | | | | | | | T | 2020 |
| | | | | | | | | | (https://www.nature.com/ |
| | | | | | | | | | articles/s41586-020- |
| | | | | | | | | | 2456-9) |
| | | | | | | C140 | 3474 | QQLNSYSY | Davide Robbiani et al., |
| | | | | | | | | T | 2020 |
| | | | | | | | | | (https://www.nature.com/ |
| | | | | | | | | | articles/s41586-020- |
| | | | | | | | | | 2456-9) |
| | | | | | | C141 | 3475 | QSYDSSN | Davide Robbiani et al., |
| | | | | | | | | WV | 2020 |
| | | | | | | | | | (https://www.nature.com/ |
| | | | | | | | | | articles/s41586-020- |
| | | | | | | | | | 2456-9) |
| | | | | | | C143 | 3476 | CSYAGAST | Davide Robbiani et al., |
| | | | | | | | | FV | 2020 |
| | | | | | | | | | (https://www.nature.com/ |
| | | | | | | | | | articles/s41586-020- |
| | | | | | | | | | 2456-9) |
| | | | | | | C144 | 3477 | SSYTSSSTR | Davide Robbiani et al., |
| | | | | | | | | V | 2020 |
| | | | | | | | | | (https://www.nature.com/ |
| | | | | | | | | | articles/s41586-020- |
| | | | | | | | | | 2456-9) |
| | | | | | | C145 | 3478 | SSYTSSTTR | Davide Robbiani et al., |
| | | | | | | | | V | 2020 |
| | | | | | | | | | (https://www.nature.com/ |
| | | | | | | | | | articles/s41586-020- |
| | | | | | | | | | 2456-9) |
| | | | | | | C146 | 3479 | SSYRGSSTP | Davide Robbiani et al., |
| | | | | | | | | YV | 2020 |
| | | | | | | | | | (https://www.nature.com/ |
| | | | | | | | | | articles/s41586-020- |
| | | | | | | | | | 2456-9) |
| | | | | | | C147 | 3480 | LLSYSGAR | Davide Robbiani et al., |
| | | | | | | | | PV | 2020 |
| | | | | | | | | | (https://www.nature.com/ |
| | | | | | | | | | articles/s41586-020- |
| | | | | | | | | | 2456-9) |
| | | | | | | C148 | 3481 | QQYNNWP | Davide Robbiani et al., |
| | | | | | | | | PLT | 2020 |
| | | | | | | | | | (https://www.nature.com/ |
| | | | | | | | | | articles/s41586-020- |
| | | | | | | | | | 2456-9) |
| | | | | | | C150 | 3482 | SSYRSSSTL | Davide Robbiani et al., |
| | | | | | | | | V | 2020 |
| | | | | | | | | | (https://www.nature.com/ |
| | | | | | | | | | articles/s41586-020- |
| | | | | | | | | | 2456-9) |
| | | | | | | C151 | 3483 | QSYDSSNY | Davide Robbiani et al., |
| | | | | | | | | WV | 2020 |
| | | | | | | | | | (https://www.nature.com/ |
| | | | | | | | | | articles/s41586-020- |
| | | | | | | | | | 2456-9) |
| | | | | | | C153 | 3484 | CSYAGSST | Davide Robbiani et al., |
| | | | | | | | | WV | 2020 |
| | | | | | | | | | (https://www.nature.com/ |
| | | | | | | | | | articles/s41586-020- |
| | | | | | | | | | 2456-9) |
| | | | | | | C154 | 3485 | QQYDNLPI | Davide Robbiani et al., |
| | | | | | | | | T | 2020 |
| | | | | | | | | | (https://www.nature.com/ |
| | | | | | | | | | articles/s41586-020- |
| | | | | | | | | | 2456-9) |
| | | | | | | C155 | 3486 | QQYNNWP | Davide Robbiani et al., |
| | | | | | | | | RT | 2020 |
| | | | | | | | | | (https://www.nature.com/ |
| | | | | | | | | | articles/s41586-020- |
| | | | | | | | | | 2456-9) |
| | | | | | | C156 | 3487 | QVWDSSS | Davide Robbiani et al., |
| | | | | | | | | DPWV | 2020 |
| | | | | | | | | | (https://www.nature.com/ |
| | | | | | | | | | articles/s41586-020- |
| | | | | | | | | | 2456-9) |
| | | | | | | C164 | 3488 | CSYAGAST | Davide Robbiani et al., |
| | | | | | | | | FV | 2020 |
| | | | | | | | | | (https://www.nature.com/ |
| | | | | | | | | | articles/s41586-020- |
| | | | | | | | | | 2456-9) |
| | | | | | | C165 | 3489 | QQYGSSP | Davide Robbiani et al., |
| | | | | | | | | WT | 2020 |
| | | | | | | | | | (https://www.biorxiv. |
| | | | | | | | | | org/content/10.1101/ |
| | | | | | | | | | 2020.05.13.092619v2) |
| | | | | | | C201 | 3490 | QQANSFPL | Davide Robbiani et al., |
| | | | | | | | | T | 2020 |
| | | | | | | | | | (https://www.biorxiv. |
| | | | | | | | | | org/content/10.1101/ |
| | | | | | | | | | 2020.05.13.092619v2) |
| | | | | | | C202 | 3491 | QQYDNLP | Davide Robbiani et al., |
| | | | | | | | | RS | 2020 |
| | | | | | | | | | (https://www.biorxiv. |
| | | | | | | | | | org/content/10.1101/ |
| | | | | | | | | | 2020.05.13.092619v2) |
| | | | | | | C204 | 3492 | QQSYSTPP | Davide Robbiani et al., |
| | | | | | | | | WT | 2020 |
| | | | | | | | | | (https://www.biorxiv. |
| | | | | | | | | | org/content/10.1101/ |
| | | | | | | | | | 2020.05.13.092619v2) |
| | | | | | | C205 | 3493 | QQYVSSP | Davide Robbiani et al., |
| | | | | | | | | WT | 2020 |
| | | | | | | | | | (https://www.biorxiv. |
| | | | | | | | | | org/content/10.1101/ |
| | | | | | | | | | 2020.05.13.092619v2) |
| | | | | | | C207 | 3494 | QQRSNWP | Davide Robbiani et al., |
| | | | | | | | | RG | 2020 |
| | | | | | | | | | (https://www.biorxiv. |
| | | | | | | | | | org/content/10.1101/ |
| | | | | | | | | | 2020.05.13.092619v2) |
| | | | | | | C208 | 3495 | QQYGSSLT | Davide Robbiani et al., |
| | | | | | | | | | 2020 |
| | | | | | | | | | (https://www.biorxiv. |
| | | | | | | | | | org/content/10.1101/ |
| | | | | | | | | | 2020.05.13.092619v2) |
| | | | | | | C210 | 3496 | QQLNSYP | Davide Robbiani et al., |
| | | | | | | | | QGT | 2020 |
| | | | | | | | | | (https://www.biorxiv. |
| | | | | | | | | | org/content/10.1101/ |
| | | | | | | | | | 2020.05.13.092619v2) |
| | | | | | | C211 | 3497 | QQYNNWP | Davide Robbiani et al., |
| | | | | | | | | RT | 2020 |
| | | | | | | | | | (https://www.biorxiv. |
| | | | | | | | | | org/content/10.1101/ |
| | | | | | | | | | 2020.05.13.092619v2) |
| | | | | | | C212 | 3498 | CSYAGSST | Davide Robbiani et al., |
| | | | | | | | | RL | 2020 |
| | | | | | | | | | (https://www.biorxiv. |
| | | | | | | | | | org/content/10.1101/ |
| | | | | | | | | | 2020.05.13.092619v2) |
| | | | | | | C214 | 3499 | QQSYSTPP | Davide Robbiani et al., |
| | | | | | | | | WT | 2020 |
| | | | | | | | | | (https://www.biorxiv. |
| | | | | | | | | | org/content/10.1101/ |
| | | | | | | | | | 2020.05.13.092619v2) |
| | | | | | | C215 | 3500 | QQSYSTPP | Davide Robbiani et al., |
| | | | | | | | | WT | 2020 |
| | | | | | | | | | (https://www.biorxiv. |
| | | | | | | | | | org/content/10.1101/ |
| | | | | | | | | | 2020.05.13.092619v2) |
| | | | | | | C216 | 3501 | QQSYSTPPI | Davide Robbiani et al., |
| | | | | | | | | T | 2020 |
| | | | | | | | | | (https://www.biorxiv. |
| | | | | | | | | | org/content/10.1101/ |
| | | | | | | | | | 2020.05.13.092619v2) |
| | | | | | | CA1 | 3502 | QQRRNW | Rui Shi et al., 2020 |
| | | | | | | | | GT | (https://www.nature.com/ |
| | | | | | | | | | articles/s41586-020- |
| | | | | | | | | | 2381- |
| | | | | | | | | | y_reference.pdf); NCBI |
| | | | | | | | | | (https://www.ncbi.nlm. |
| | | | | | | | | | nih.gov/nuccore/MT470194); |
| | | | | | | | | | NCBI |
| | | | | | | | | | (https://www.ncbi.nlm. |
| | | | | | | | | | nih.gov/nuccore/MT4701945) |
| | | | | | | CB6 | 3503 | QQSYSTPP | Rui Shi et al., 2020 |
| | | | | | | | | EYT | (https://www.nature.com/ |
| | | | | | | | | | articles/s41586-020- |
| | | | | | | | | | 2381- |
| | | | | | | | | | y_reference.pdf); NCBI |
| | | | | | | | | | (https://www.ncbi.nlm. |
| | | | | | | | | | nih.gov/nuccore/MT470 |
| | | | | | | | | | 194);NCBI |
| | | | | | | | | | (https://www.ncbi.nlm. |
| | | | | | | | | | nih.gov/nuccore/MT4701945) |
| | | | | | | CC12.1 | 3504 | QQLNSYPP | Thomas Rogers et al., |
| | | | | | | | | KFT | 2020 |
| | | | | | | | | | (https://science.sciencemag. |
| | | | | | | | | | org/content/early/ |
| | | | | | | | | | 2020/06/15/science.abc7520); |
| | | | | | | | | | Meng Yuan et al., 2020 |
| | | | | | | | | | (https://www.biorxiv. |
| | | | | | | | | | org/content/10.1101/ |
| | | | | | | | | | 2020.06.08.141267v1) |
| | | | | | | CC12.10 | 3505 | SSYAGSST | Thomas Rogers et al., |
| | | | | | | | | QV | 2020 |
| | | | | | | | | | (https://science.sciencemag. |
| | | | | | | | | | org/content/early/ |
| | | | | | | | | | 2020/06/15/science.abc7520) |
| | | | | | | CC12.11 | 3506 | SSYTSSSAQ | Thomas Rogers et al., |
| | | | | | | | | L | 2020 |
| | | | | | | | | | (https://science.sciencemag. |
| | | | | | | | | | org/content/early/ |
| | | | | | | | | | 2020/06/15/science.abc7520) |
| | | | | | | CC12.12 | 3507 | SSYTSGST | Thomas Rogers et al., |
| | | | | | | | | QV | 2020 |
| | | | | | | | | | (https://science.sciencemag. |
| | | | | | | | | | org/content/early/ |
| | | | | | | | | | 2020/06/15/science.abc7520) |
| | | | | | | CC12.13 | 3508 | QQYDNLPI | Thomas Rogers et al., |
| | | | | | | | | T | 2020 |
| | | | | | | | | | (https://science.sciencemag. |
| | | | | | | | | | org/content/early/ |
| | | | | | | | | | 2020/06/15/science.abc7520) |
| | | | | | | CC12.14 | 3509 | MQGTHW | Thomas Rogers et al., |
| | | | | | | | | PPT | 2020 |
| | | | | | | | | | (https://science.sciencemag. |
| | | | | | | | | | org/content/early/ |
| | | | | | | | | | 2020/06/15/science.abc7520) |
| | | | | | | CC12.15 | 3510 | QSYDSSLS | Thomas Rogers et al., |
| | | | | | | | | GW | 2020 |
| | | | | | | | | | (https://science.sciencemag. |
| | | | | | | | | | org/content/early/ |
| | | | | | | | | | 2020/06/15/science.abc7520) |
| | | | | | | CC12.16 | 3511 | QVWDSSS | Thomas Rogers et al., |
| | | | | | | | | DPWV | 2020 |
| | | | | | | | | | (https://science.sciencemag. |
| | | | | | | | | | org/content/early/ |
| | | | | | | | | | 2020/06/15/science.abc7520) |
| | | | | | | CC12.17 | 3512 | QVWDSSS | Thomas Rogers et al., |
| | | | | | | | | DHPW | 2020 |
| | | | | | | | | | (https://science.sciencemag. |
| | | | | | | | | | org/content/early/ |
| | | | | | | | | | 2020/06/15/science.abc7520) |
| | | | | | | CC12.18 | 3513 | QSYDSSNH | Thomas Rogers et al., |
| | | | | | | | | EEIWV | 2020 |
| | | | | | | | | | (https://science.sciencemag. |
| | | | | | | | | | org/content/early/ |
| | | | | | | | | | 2020/06/15/science.abc7520) |
| | | | | | | CC12.19 | 3514 | QVWDNNS | Thomas Rogers et al., |
| | | | | | | | | DHLV | 2020 |
| | | | | | | | | | (https://science.sciencemag. |
| | | | | | | | | | org/content/early/ |
| | | | | | | | | | 2020/06/15/science.abc7520) |
| | | | | | | CC12.2 | 3515 | QQYGSSPR | Thomas Rogers et al., |
| | | | | | | | | T | 2020 |
| | | | | | | | | | (https://science.sciencemag. |
| | | | | | | | | | org/content/early/ |
| | | | | | | | | | 2020/06/15/science.abc7520) |
| | | | | | | CC12.20 | 3516 | AAWDDSL | Thomas Rogers et al., |
| | | | | | | | | SGRW | 2020 |
| | | | | | | | | | (https://science.sciencemag. |
| | | | | | | | | | org/content/early/ |
| | | | | | | | | | 2020/06/15/science.abc7520) |
| | | | | | | CC12.21 | 3517 | AAWDDSL | Thomas Rogers et al., |
| | | | | | | | | NGPV | 2020 |
| | | | | | | | | | (https://science.sciencemag. |
| | | | | | | | | | org/content/early/ |
| | | | | | | | | | 2020/06/15/science.abc7520) |
| | | | | | | CC12.23 | 3518 | QSADSSGT | Thomas Rogers et al., |
| | | | | | | | | YLVV | 2020 |
| | | | | | | | | | (https://science.sciencemag. |
| | | | | | | | | | org/content/early/ |
| | | | | | | | | | 2020/06/15/science.abc7520) |
| | | | | | | CC12.24 | 3519 | QQSYSTP | Thomas Rogers et al., |
| | | | | | | | | WT | 2020 |
| | | | | | | | | | (https://science.sciencemag. |
| | | | | | | | | | org/content/early/ |
| | | | | | | | | | 2020/06/15/science.abc7520) |
| | | | | | | CC12.25 | 3520 | AAWDDSL | Thomas Rogers et al., |
| | | | | | | | | NGPV | 2020 |
| | | | | | | | | | (https://science.sciencemag. |
| | | | | | | | | | org/content/early/ |
| | | | | | | | | | 2020/06/15/science.abc7520) |
| | | | | | | CC12.26 | 3521 | LLYYGGAQ | Thomas Rogers et al., |
| | | | | | | | | RWV | 2020 |
| | | | | | | | | | (https://science.sciencemag. |
| | | | | | | | | | org/content/early/ |
| | | | | | | | | | 2020/06/15/science.abc7520) |
| | | | | | | CC12.27 | 3522 | YSYAGSSTF | Thomas Rogers et al., |
| | | | | | | | | V | 2020 |
| | | | | | | | | | (https://science.sciencemag. |
| | | | | | | | | | org/content/early/ |
| | | | | | | | | | 2020/06/15/science.abc7520) |
| | | | | | | CC12.28 | 3523 | AAWDDSL | Thomas Rogers et al., |
| | | | | | | | | SGWV | 2020 |
| | | | | | | | | | (https://science.sciencemag. |
| | | | | | | | | | org/content/early/ |
| | | | | | | | | | 2020/06/15/science.abc7520) |
| | | | | | | CC12.3 | 3524 | QQYGSSPR | Thomas Rogers et al., |
| | | | | | | | | T | 2020 |
| | | | | | | | | | (https://science.sciencemag. |
| | | | | | | | | | org/content/early/ |
| | | | | | | | | | 2020/06/15/science.abc7520); |
| | | | | | | | | | Meng Yuan et al., 2020 |
| | | | | | | | | | (https://www.biorxiv. |
| | | | | | | | | | org/content/10.1101/ |
| | | | | | | | | | 2020.06.08.141267v1) |
| | | | | | | CC12.4 | 3525 | TSYAGSNN | Thomas Rogers et al., |
| | | | | | | | | FV | 2020 |
| | | | | | | | | | (https://science.sciencemag. |
| | | | | | | | | | org/content/early/ |
| | | | | | | | | | 2020/06/15/science.abc7520) |
| | | | | | | CC12.5 | 3526 | SSYTSSSTQ | Thomas Rogers et al., |
| | | | | | | | | V | 2020 |
| | | | | | | | | | (https://science.sciencemag. |
| | | | | | | | | | org/content/early/ |
| | | | | | | | | | 2020/06/15/science.abc7520) |
| | | | | | | CC12.6 | 3527 | SSYTSSSTQ | Thomas Rogers et al., |
| | | | | | | | | V | 2020 |
| | | | | | | | | | (https://science.sciencemag. |
| | | | | | | | | | org/content/early/ |
| | | | | | | | | | 2020/06/15/science.abc7520) |
| | | | | | | CC12.7 | 3528 | SSYTVSSTQ | Thomas Rogers et al., |
| | | | | | | | | V | 2020 |
| | | | | | | | | | (https://science.sciencemag. |
| | | | | | | | | | org/content/early/ |
| | | | | | | | | | 2020/06/15/science.abc7520) |
| | | | | | | CC12.8 | 3529 | SSYTSSSAQ | Thomas Rogers et al., |
| | | | | | | | | L | 2020 |
| | | | | | | | | | (https://science.sciencemag. |
| | | | | | | | | | org/content/early/ |
| | | | | | | | | | 2020/06/15/science.abc7520) |
| | | | | | | CC12.9 | 3530 | SSYTSSSAQ | Thomas Rogers et al., |
| | | | | | | | | V | 2020 |
| | | | | | | | | | (https://science.sciencemag. |
| | | | | | | | | | org/content/early/ |
| | | | | | | | | | 2020/06/15/science.abc7520) |
| | | | | | | CC6.29 | 3531 | QQSYSTPP | Thomas Rogers et al., |
| | | | | | | | | T | 2020 |
| | | | | | | | | | (https://science.sciencemag. |
| | | | | | | | | | org/content/early/ |
| | | | | | | | | | 2020/06/15/science.abc7520) |
| | | | | | | CC6.30 | 3532 | QQSYSTPR | Thomas Rogers et al., |
| | | | | | | | | T | 2020 |
| | | | | | | | | | (https://science.sciencemag. |
| | | | | | | | | | org/content/early/ |
| | | | | | | | | | 2020/06/15/science.abc7520) |
| | | | | | | CC6.31 | 3533 | LQHNSYPIL | Thomas Rogers et al., |
| | | | | | | | | T | 2020 |
| | | | | | | | | | (https://science.sciencemag. |
| | | | | | | | | | org/content/early/ |
| | | | | | | | | | 2020/06/15/science.abc7520) |
| | | | | | | CC6.32 | 3534 | QVWDSSS | Thomas Rogers et al., |
| | | | | | | | | DHPYV | 2020 |
| | | | | | | | | | (https://science.sciencemag. |
| | | | | | | | | | org/content/early/ |
| | | | | | | | | | 2020/06/15/science.abc7520) |
| | | | | | | CC6.33 | 3535 | QHYGSSL | Thomas Rogers et al., |
| | | | | | | | | WT | 2020 |
| | | | | | | | | | (https://science.sciencemag. |
| | | | | | | | | | org/content/early/ |
| | | | | | | | | | 2020/06/15/science.abc7520) |
| | | | | | | Clone11- | 3536 | FQGSHVPL | Nadezhda Antipova et |
| | | | | | | 9 | | T | al., 2020 |
| | | | | | | CnC2t1p1_ | 3537 | QQRSNWP | Christoph Kreer et al., |
| | | | | | | B10 | | PALT | 2020 |
| | | | | | | | | | (https://doi.org/10.1016/ |
| | | | | | | | | | j.cell.2020.06.044) |
| | | | | | | CnC2t1p1_ | 3538 | CSYAGSST | Christoph Kreer et al., |
| | | | | | | B4 | | WV | 2020 |
| | | | | | | | | | (https://doi.org/10.1016/ |
| | | | | | | | | | j.cell.2020.06.044) |
| | | | | | | CnC2t1p1_ | 3539 | MQALQTP | Christoph Kreer et al., |
| | | | | | | D6 | | GT | 2020 |
| | | | | | | | | | (https://doi.org/10.1016/ |
| | | | | | | | | | j.cell.2020.06.044) |
| | | | | | | CnC2t1p1_ | 3540 | MQALQTP | Christoph Kreer et al., |
| | | | | | | E12 | | GT | 2020 |
| | | | | | | | | | (https://doi.org/10.1016/ |
| | | | | | | | | | j.cell.2020.06.044) |
| | | | | | | CnC2t1p1_ | 3541 | CSYAGVRT | Christoph Kreer et al., |
| | | | | | | E8 | | W | 2020 |
| | | | | | | | | | (https://doi.org/10.1016/ |
| | | | | | | | | | j.cell.2020.06.044) |
| | | | | | | CnC2t1p1_ | 3542 | CSYAGVRT | Christoph Kreer et al., |
| | | | | | | G6 | | W | 2020 |
| | | | | | | | | | (https://doi.org/10.1016/ |
| | | | | | | | | | j.cell.2020.06.044) |
| | | | | | | COV2- | 3543 | QQYGSSP | Seth Zost et al., 2020 |
| | | | | | | 2006 | | WT | (https://www.nature.com/ |
| | | | | | | | | | articles/s41591-020- |
| | | | | | | | | | 0998-x) |
| | | | | | | COV2- | 3544 | QQYDNLLF | Seth Zost et al., 2020 |
| | | | | | | 2007 | | T | (https://www.nature.com/ |
| | | | | | | | | | articles/s41591-020- |
| | | | | | | | | | 0998-x) |
| | | | | | | COV2- | 3545 | SSYTSSSTL | Seth Zost et al., 2020 |
| | | | | | | 2009 | | WV | (https://www.nature.com/ |
| | | | | | | | | | articles/s41591-020- |
| | | | | | | | | | 0998-x) |
| | | | | | | COV2- | 3546 | QQSYSTFT | Seth Zost et al., 2020 |
| | | | | | | 2011 | | | (https://www.nature.com/ |
| | | | | | | | | | articles/s41591-020- |
| | | | | | | | | | 0998-x) |
| | | | | | | COV2- | 3547 | QQYYTAPL | Seth Zost et al., 2020 |
| | | | | | | 2013 | | T | (https://www.nature.com/ |
| | | | | | | | | | articles/s41591-020- |
| | | | | | | | | | 0998-x) |
| | | | | | | COV2- | 3548 | QQRSNWP | Seth Zost et al., 2020 |
| | | | | | | 2015 | | PYT | (https://www.nature.com/ |
| | | | | | | | | | articles/s41591-020- |
| | | | | | | | | | 0998-x) |
| | | | | | | COV2- | 3549 | SSYTSSTT | Seth Zost et al., 2020 |
| | | | | | | 2016 | | WV | (https://www.nature.com/ |
| | | | | | | | | | articles/s41591-020- |
| | | | | | | | | | 0998-x) |
| | | | | | | COV2- | 3550 | QSFDSSLS | Seth Zost et al., 2020 |
| | | | | | | 2017 | | GSDV | (https://www.nature.com/ |
| | | | | | | | | | articles/s41591-020- |
| | | | | | | | | | 0998-x) |
| | | | | | | COV2- | 3551 | AAWDASL | Seth Zost et al., 2020 |
| | | | | | | 2021 | | SGHVV | (https://www.nature.com/ |
| | | | | | | | | | articles/s41591-020- |
| | | | | | | | | | 0998-x) |
| | | | | | | COV2- | 3552 | MQRIEFP | Seth Zost et al., 2020 |
| | | | | | | 2022 | | WT | (https://www.nature.com/ |
| | | | | | | | | | articles/s41591-020- |
| | | | | | | | | | 0998-x) |
| | | | | | | COV2- | 3553 | QQYYTAPL | Seth Zost et al., 2020 |
| | | | | | | 2025 | | T | (https://www.nature.com/ |
| | | | | | | | | | articles/s41591-020- |
| | | | | | | | | | 0998-x) |
| | | | | | | COV2- | 3554 | QQYNSYP | Seth Zost et al., 2020 |
| | | | | | | 2026 | | WT | (https://www.nature.com/ |
| | | | | | | | | | articles/s41591-020- |
| | | | | | | | | | 0998-x) |
| | | | | | | COV2- | 3555 | QSADSSGT | Seth Zost et al., 2020 |
| | | | | | | 2027 | | YFWV | (https://www.nature.com/ |
| | | | | | | | | | articles/s41591-020- |
| | | | | | | | | | 0998-x) |
| | | | | | | COV2- | 3556 | QQYYTAPL | Seth Zost et al., 2020 |
| | | | | | | 2028 | | T | (https://www.nature.com/ |
| | | | | | | | | | articles/s41591-020- |
| | | | | | | | | | 0998-x) |
| | | | | | | COV2- | 3557 | SVWDDSL | Seth Zost et al., 2020 |
| | | | | | | 2029 | | NGPL | (https://www.nature.com/ |
| | | | | | | | | | articles/s41591-020- |
| | | | | | | | | | 0998-x) |
| | | | | | | COV2- | 3558 | QSSDSSGV | Seth Zost et al., 2020 |
| | | | | | | 2031 | | V | (https://www.nature.com/ |
| | | | | | | | | | articles/s41591-020- |
| | | | | | | | | | 0998-x) |
| | | | | | | COV2- | 3559 | QQYNSYS | Seth Zost et al., 2020 |
| | | | | | | 2032 | | WT | (https://www.nature.com/ |
| | | | | | | | | | articles/s41591-020- |
| | | | | | | | | | 0998-x) |
| | | | | | | COV2- | 3560 | SVWDDSL | Seth Zost et al., 2020 |
| | | | | | | 2033 | | NGPL | (https://www.nature.com/ |
| | | | | | | | | | articles/s41591-020- |
| | | | | | | | | | 0998-x) |
| | | | | | | COV2- | 3561 | QQSYSTPP | Seth Zost et al., 2020 |
| | | | | | | 2034 | | T | (https://www.nature.com/ |
| | | | | | | | | | articles/s41591-020- |
| | | | | | | | | | 0998-x) |
| | | | | | | COV2- | 3562 | QQSYNTPR | Seth Zost et al., 2020 |
| | | | | | | 2035 | | T | (https://www.nature.com/ |
| | | | | | | | | | articles/s41591-020- |
| | | | | | | | | | 0998-x) |
| | | | | | | COV2- | 3563 | QQTNSFPT | Seth Zost et al., 2020 |
| | | | | | | 2037 | | | (https://www.nature.com/ |
| | | | | | | | | | articles/s41591-020- |
| | | | | | | | | | 0998-x) |
| | | | | | | COV2- | 3564 | QQYGNSP | Seth Zost et al., 2020 |
| | | | | | | 2039 | | Q | (https://www.nature.com/ |
| | | | | | | | | | articles/s41591-020- |
| | | | | | | | | | 0998-x) |
| | | | | | | COV2- | 3565 | QQYNSYST | Seth Zost et al., 2020 |
| | | | | | | 2041 | | WT | (https://www.nature.com/ |
| | | | | | | | | | articles/s41591-020- |
| | | | | | | | | | 0998-x) |
| | | | | | | COV2- | 3566 | QQSYNTPY | Seth Zost et al., 2020 |
| | | | | | | 2046 | | T | (https://www.nature.com/ |
| | | | | | | | | | articles/s41591-020- |
| | | | | | | | | | 0998-x) |
| | | | | | | COV2- | 3567 | AAWDDSL | Seth Zost et al., 2020 |
| | | | | | | 2050 | | NALV | (https://www.nature.com/ |
| | | | | | | | | | articles/s41591-020- |
| | | | | | | | | | 0998-x) |
| | | | | | | COV2- | 3568 | QQSYSTPG | Seth Zost et al., 2020 |
| | | | | | | 2051 | | T | (https://www.nature.com/ |
| | | | | | | | | | articles/s41591-020- |
| | | | | | | | | | 0998-x) |
| | | | | | | COV2- | 3569 | QQSDNLP | Seth Zost et al., 2020 |
| | | | | | | 2054 | | MYT | (https://www.nature.com/ |
| | | | | | | | | | articles/s41591-020- |
| | | | | | | | | | 0998-x) |
| | | | | | | COV2- | 3570 | QVWDSSS | Seth Zost et al., 2020 |
| | | | | | | 2055 | | DHHW | (https://www.nature.com/ |
| | | | | | | | | | articles/s41591-020- |
| | | | | | | | | | 0998-x) |
| | | | | | | COV2- | 3571 | LVWDDSL | Seth Zost et al., 2020 |
| | | | | | | 2064 | | NGLV | (https://www.nature.com/ |
| | | | | | | | | | articles/s41591-020- |
| | | | | | | | | | 0998-x) |
| | | | | | | COV2- | 3572 | QSYDSRLS | Seth Zost et al., 2020 |
| | | | | | | 2068 | | GFW | (https://www.nature.com/ |
| | | | | | | | | | articles/s41591-020- |
| | | | | | | | | | 0998-x) |
| | | | | | | COV2- | 3573 | QQSYTTLL | Seth Zost et al., 2020 |
| | | | | | | 2070 | | T | (https://www.nature.com/ |
| | | | | | | | | | articles/s41591-020- |
| | | | | | | | | | 0998-x) |
| | | | | | | COV2- | 3574 | QQYGSSP | Seth Zost et al., 2020 |
| | | | | | | 2072 | | WT | (https://www.nature.com/ |
| | | | | | | | | | articles/s41591-020- |
| | | | | | | | | | 0998-x) |
| | | | | | | COV2- | 3575 | QSYDSSLS | Seth Zost et al., 2020 |
| | | | | | | 2078 | | DSV | (https://www.nature.com/ |
| | | | | | | | | | articles/s41591-020- |
| | | | | | | | | | 0998-x) |
| | | | | | | COV2- | 3576 | QLLSSHPL | Seth Zost et al., 2020 |
| | | | | | | 2080 | | T | (https://www.nature.com/ |
| | | | | | | | | | articles/s41591-020- |
| | | | | | | | | | 0998-x) |
| | | | | | | COV2- | 3577 | SSRDSSGS | Seth Zost et al., 2020 |
| | | | | | | 2082 | | AW | (https://www.nature.com/ |
| | | | | | | | | | articles/s41591-020- |
| | | | | | | | | | 0998-x) |
| | | | | | | COV2- | 3578 | QQYASLPF | Seth Zost et al., 2020 |
| | | | | | | 2083 | | T | (https://www.nature.com/ |
| | | | | | | | | | articles/s41591-020- |
| | | | | | | | | | 0998-x) |
| | | | | | | COV2- | 3579 | SSRDSSGS | Seth Zost et al., 2020 |
| | | | | | | 2094 | | AW | (https://www.nature.com/ |
| | | | | | | | | | articles/s41591-020- |
| | | | | | | | | | 0998-x) |
| | | | | | | COV2- | 3580 | AVWDDSL | Seth Zost et al., 2020 |
| | | | | | | 2096 | | SGLV | (https://www.nature.com/ |
| | | | | | | | | | articles/s41591-020- |
| | | | | | | | | | 0998-x) |
| | | | | | | COV2- | 3581 | QQSYSTP | Seth Zost et al., 2020 |
| | | | | | | 2097 | | WT | (https://www.nature.com/ |
| | | | | | | | | | articles/s41591-020- |
| | | | | | | | | | 0998-x) |
| | | | | | | COV2- | 3582 | HQYSSWP | Seth Zost et al., 2020 |
| | | | | | | 2098 | | QT | (https://www.nature.com/ |
| | | | | | | | | | articles/s41591-020- |
| | | | | | | | | | 0998-x) |
| | | | | | | COV2- | 3583 | QSYDGISR | Seth Zost et al., 2020 |
| | | | | | | 2103 | | AWV | (https://www.nature.com/ |
| | | | | | | | | | articles/s41591-020- |
| | | | | | | | | | 0998-x) |
| | | | | | | COV2- | 3584 | MQALQTP | Seth Zost et al., 2020 |
| | | | | | | 2108 | | LT | (https://www.nature.com/ |
| | | | | | | | | | articles/s41591-020- |
| | | | | | | | | | 0998-x) |
| | | | | | | COV2- | 3585 | QQSYSSLSI | Seth Zost et al., 2020 |
| | | | | | | 2110 | | T | (https://www.nature.com/ |
| | | | | | | | | | articles/s41591-020- |
| | | | | | | | | | 0998-x) |
| | | | | | | COV2- | 3586 | QQSYEIPP | Seth Zost et al., 2020 |
| | | | | | | 2111 | | WT | (https://www.nature.com/ |
| | | | | | | | | | articles/s41591-020- |
| | | | | | | | | | 0998-x) |
| | | | | | | COV2- | 3587 | QQYDSLP | Seth Zost et al., 2020 |
| | | | | | | 2113 | | PV | (https://www.nature.com/ |
| | | | | | | | | | articles/s41591-020- |
| | | | | | | | | | 0998-x) |
| | | | | | | COV2- | 3588 | QSYDSSLS | Seth Zost et al., 2020 |
| | | | | | | 2114 | | GSV | (https://www.nature.com/ |
| | | | | | | | | | articles/s41591-020- |
| | | | | | | | | | 0998-x) |
| | | | | | | COV2- | 3589 | QSYDSGNP | Seth Zost et al., 2020 |
| | | | | | | 2128 | | | (https://www.nature.com/ |
| | | | | | | | | | articles/s41591-020- |
| | | | | | | | | | 0998-x) |
| | | | | | | COV2- | 3590 | QQYYSTLT | Seth Zost et al., 2020 |
| | | | | | | 2130 | | | (https://www.nature.com/ |
| | | | | | | | | | articles/s41591-020- |
| | | | | | | | | | 0998-x) |
| | | | | | | COV2- | 3591 | QQYDNLP | Seth Zost et al., 2020 |
| | | | | | | 2132 | | PV | (https://www.nature.com/ |
| | | | | | | | | | articles/s41591-020- |
| | | | | | | | | | 0998-x) |
| | | | | | | COV2- | 3592 | QSYDGINR | Seth Zost et al., 2020 |
| | | | | | | 2137 | | WLV | (https://www.nature.com/ |
| | | | | | | | | | articles/s41591-020- |
| | | | | | | | | | 0998-x) |
| | | | | | | COV2- | 3593 | GADHGSG | Seth Zost et al., 2020 |
| | | | | | | 2142 | | SNFEYVV | (https://www.nature.com/ |
| | | | | | | | | | articles/s41591-020- |
| | | | | | | | | | 0998-x) |
| | | | | | | COV2- | 3594 | AAWDDSL | Seth Zost et al., 2020 |
| | | | | | | 2143 | | NGYV | (https://www.nature.com/ |
| | | | | | | | | | articles/s41591-020- |
| | | | | | | | | | 0998-x) |
| | | | | | | COV2- | 3595 | QQLNSYPV | Seth Zost et al., 2020 |
| | | | | | | 2146 | | T | (https://www.nature.com/ |
| | | | | | | | | | articles/s41591-020- |
| | | | | | | | | | 0998-x) |
| | | | | | | COV2- | 3596 | SSYTSSSTL | Seth Zost et al., 2020 |
| | | | | | | 2147 | | LYV | (https://www.nature.com/ |
| | | | | | | | | | articles/s41591-020- |
| | | | | | | | | | 0998-x) |
| | | | | | | COV2- | 3597 | QVWDSSS | Seth Zost et al., 2020 |
| | | | | | | 2150 | | DHPGV | (https://www.nature.com/ |
| | | | | | | | | | articles/s41591-020- |
| | | | | | | | | | 0998-x) |
| | | | | | | COV2- | 3598 | HYRSNWP | Seth Zost et al., 2020 |
| | | | | | | 2151 | | PVLT | (https://www.nature.com/ |
| | | | | | | | | | articles/s41591-020- |
| | | | | | | | | | 0998-x) |
| | | | | | | COV2- | 3599 | QQYDNLYS | Seth Zost et al., 2020 |
| | | | | | | 2158 | | VH | (https://www.nature.com/ |
| | | | | | | | | | articles/s41591-020- |
| | | | | | | | | | 0998-x) |
| | | | | | | COV2- | 3600 | SSYTSSSTL | Seth Zost et al., 2020 |
| | | | | | | 2159 | | LYV | (https://www.nature.com/ |
| | | | | | | | | | articles/s41591-020- |
| | | | | | | | | | 0998-x) |
| | | | | | | COV2- | 3601 | SSYTSSSTL | Seth Zost et al., 2020 |
| | | | | | | 2160 | | LYV | (https://www.nature.com/ |
| | | | | | | | | | articles/s41591-020- |
| | | | | | | | | | 0998-x) |
| | | | | | | COV2- | 3602 | QLLNSHPL | Seth Zost et al., 2020 |
| | | | | | | 2165 | | T | (https://www.nature.com/ |
| | | | | | | | | | articles/s41591-020- |
| | | | | | | | | | 0998-x) |
| | | | | | | COV2- | 3603 | QHRTNWP | Seth Zost et al., 2020 |
| | | | | | | 2166 | | PLFT | (https://www.nature.com/ |
| | | | | | | | | | articles/s41591-020- |
| | | | | | | | | | 0998-x) |
| | | | | | | COV2- | 3604 | QAWDSST | Seth Zost et al., 2020 |
| | | | | | | 2171 | | GV | (https://www.nature.com/ |
| | | | | | | | | | articles/s41591-020- |
| | | | | | | | | | 0998-x) |
| | | | | | | COV2- | 3605 | QQYNTYSG | Seth Zost et al., 2020 |
| | | | | | | 2173 | | T | (https://www.nature.com/ |
| | | | | | | | | | articles/s41591-020- |
| | | | | | | | | | 0998-x) |
| | | | | | | COV2- | 3606 | QAWDSST | Seth Zost et al., 2020 |
| | | | | | | 2175 | | GV | (https://www.nature.com/ |
| | | | | | | | | | articles/s41591-020- |
| | | | | | | | | | 0998-x) |
| | | | | | | COV2- | 3607 | QQTYSTF | Seth Zost et al., 2020 |
| | | | | | | 2177 | | WT | (https://www.nature.com/ |
| | | | | | | | | | articles/s41591-020- |
| | | | | | | | | | 0998-x) |
| | | | | | | COV2- | 3608 | QAWDSST | Seth Zost et al., 2020 |
| | | | | | | 2178 | | AV | (https://www.nature.com/ |
| | | | | | | | | | articles/s41591-020- |
| | | | | | | | | | 0998-x) |
| | | | | | | COV2- | 3609 | SSYTSSRAV | Seth Zost et al., 2020 |
| | | | | | | 2183 | | L | (https://www.nature.com/ |
| | | | | | | | | | articles/s41591-020- |
| | | | | | | | | | 0998-x) |
| | | | | | | COV2- | 3610 | QVWDSSS | Seth Zost et al., 2020 |
| | | | | | | 2187 | | DHPEWV | (https://www.nature.com/ |
| | | | | | | | | | articles/s41591-020- |
| | | | | | | | | | 0998-x) |
| | | | | | | COV2- | 3611 | QQSYSTPT | Seth Zost et al., 2020 |
| | | | | | | 2189 | | | (https://www.nature.com/ |
| | | | | | | | | | articles/s41591-020- |
| | | | | | | | | | 0998-x) |
| | | | | | | COV2- | 3612 | SSYTSSSTH | Seth Zost et al., 2020 |
| | | | | | | 2190 | | W | (https://www.nature.com/ |
| | | | | | | | | | articles/s41591-020- |
| | | | | | | | | | 0998-x) |
| | | | | | | COV2- | 3613 | QQYNTYSG | Seth Zost et al., 2020 |
| | | | | | | 2191 | | T | (https://www.nature.com/ |
| | | | | | | | | | articles/s41591-020- |
| | | | | | | | | | 0998-x) |
| | | | | | | COV2- | 3614 | QQYYTAPL | Seth Zost et al., 2020 |
| | | | | | | 2195 | | T | (https://www.nature.com/ |
| | | | | | | | | | articles/s41591-020- |
| | | | | | | | | | 0998-x) |
| | | | | | | COV2- | 3615 | QHYGSSRG | Seth Zost et al., 2020 |
| | | | | | | 2196 | | WT | (https://www.nature.com/ |
| | | | | | | | | | articles/s41591-020- |
| | | | | | | | | | 0998-x) |
| | | | | | | COV2- | 3616 | QQYGRSPI | Seth Zost et al., 2020 |
| | | | | | | 2197 | | T | (https://www.nature.com/ |
| | | | | | | | | | articles/s41591-020- |
| | | | | | | | | | 0998-x) |
| | | | | | | COV2- | 3617 | QAWDSST | Seth Zost et al., 2020 |
| | | | | | | 2199 | | W | (https://www.nature.com/ |
| | | | | | | | | | articles/s41591-020- |
| | | | | | | | | | 0998-x) |
| | | | | | | COV2- | 3618 | QQSYSTPY | Seth Zost et al., 2020 |
| | | | | | | 2203 | | T | (https://www.nature.com/ |
| | | | | | | | | | articles/s41591-020- |
| | | | | | | | | | 0998-x) |
| | | | | | | COV2- | 3619 | QSYDSSLG | Seth Zost et al., 2020 |
| | | | | | | 2207 | | AL | (https://www.nature.com/ |
| | | | | | | | | | articles/s41591-020- |
| | | | | | | | | | 0998-x) |
| | | | | | | COV2- | 3620 | QQANSFPP | Seth Zost et al., 2020 |
| | | | | | | 2210 | | T | (https://www.nature.com/ |
| | | | | | | | | | articles/s41591-020- |
| | | | | | | | | | 0998-x) |
| | | | | | | COV2- | 3621 | QQRGNW | Seth Zost et al., 2020 |
| | | | | | | 2212 | | WT | (https://www.nature.com/ |
| | | | | | | | | | articles/s41591-020- |
| | | | | | | | | | 0998-x) |
| | | | | | | COV2- | 3622 | QHRTNWP | Seth Zost et al., 2020 |
| | | | | | | 2214 | | PLFT | (https://www.nature.com/ |
| | | | | | | | | | articles/s41591-020- |
| | | | | | | | | | 0998-x) |
| | | | | | | COV2- | 3623 | QQCYNWP | Seth Zost et al., 2020 |
| | | | | | | 2215 | | PWT | (https://www.nature.com/ |
| | | | | | | | | | articles/s41591-020- |
| | | | | | | | | | 0998-x) |
| | | | | | | COV2- | 3624 | HKRSNWP | Seth Zost et al., 2020 |
| | | | | | | 2216 | | PSLT | (https://www.nature.com/ |
| | | | | | | | | | articles/s41591-020- |
| | | | | | | | | | 0998-x) |
| | | | | | | COV2- | 3625 | QQYYSISW | Seth Zost et al., 2020 |
| | | | | | | 2218 | | T | (https://www.nature.com/ |
| | | | | | | | | | articles/s41591-020- |
| | | | | | | | | | 0998-x) |
| | | | | | | COV2- | 3626 | CSYAVSTTY | Seth Zost et al., 2020 |
| | | | | | | 2222 | | VI | (https://www.nature.com/ |
| | | | | | | | | | articles/s41591-020- |
| | | | | | | | | | 0998-x) |
| | | | | | | COV2- | 3627 | QQYYSTP | Seth Zost et al., 2020 |
| | | | | | | 2224 | | WT | (https://www.nature.com/ |
| | | | | | | | | | articles/s41591-020- |
| | | | | | | | | | 0998-x) |
| | | | | | | COV2- | 3628 | GADHGSG | Seth Zost et al., 2020 |
| | | | | | | 2226 | | SNFVFVV | (https://www.nature.com/ |
| | | | | | | | | | articles/s41591-020- |
| | | | | | | | | | 0998-x) |
| | | | | | | COV2- | 3629 | MQALQTP | Seth Zost et al., 2020 |
| | | | | | | 2227 | | | (https://www.nature.com/ |
| | | | | | | | | | articles/s41591-020- |
| | | | | | | | | | 0998-x) |
| | | | | | | COV2- | 3630 | QQYNYWP | Seth Zost et al., 2020 |
| | | | | | | 2228 | | PLT | (https://www.nature.com/ |
| | | | | | | | | | articles/s41591-020- |
| | | | | | | | | | 0998-x) |
| | | | | | | COV2- | 3631 | QVWDSSS | Seth Zost et al., 2020 |
| | | | | | | 2231 | | DHHW | (https://www.nature.com/ |
| | | | | | | | | | articles/s41591-020- |
| | | | | | | | | | 0998-x) |
| | | | | | | COV2- | 3632 | QQYNTYS | Seth Zost et al., 2020 |
| | | | | | | 2235 | | QT | (https://www.nature.com/ |
| | | | | | | | | | articles/s41591-020- |
| | | | | | | | | | 0998-x) |
| | | | | | | COV2- | 3633 | QAWDND | Seth Zost et al., 2020 |
| | | | | | | 2238 | | AGW | (https://www.nature.com/ |
| | | | | | | | | | articles/s41591-020- |
| | | | | | | | | | 0998-x) |
| | | | | | | COV2- | 3634 | QQYNSHP | Seth Zost et al., 2020 |
| | | | | | | 2239 | | PT | (https://www.nature.com/ |
| | | | | | | | | | articles/s41591-020- |
| | | | | | | | | | 0998-x) |
| | | | | | | COV2- | 3635 | SAYAGSNN | Seth Zost et al., 2020 |
| | | | | | | 2240 | | LV | (https://www.nature.com/ |
| | | | | | | | | | articles/s41591-020- |
| | | | | | | | | | 0998-x) |
| | | | | | | COV2- | 3636 | GADHGSG | Seth Zost et al., 2020 |
| | | | | | | 2241 | | SNFEYVV | (https://www.nature.com/ |
| | | | | | | | | | articles/s41591-020- |
| | | | | | | | | | 0998-x) |
| | | | | | | COV2- | 3637 | CSYAGIVL | Seth Zost et al., 2020 |
| | | | | | | 2243 | | | (https://www.nature.com/ |
| | | | | | | | | | articles/s41591-020- |
| | | | | | | | | | 0998-x) |
| | | | | | | COV2- | 3638 | QSGDSSGT | Seth Zost et al., 2020 |
| | | | | | | 2245 | | YVV | (https://www.nature.com/ |
| | | | | | | | | | articles/s41591-020- |
| | | | | | | | | | 0998-x) |
| | | | | | | COV2- | 3639 | QSVDRSGT | Seth Zost et al., 2020 |
| | | | | | | 2248 | | YFNWV | (https://www.nature.com/ |
| | | | | | | | | | articles/s41591-020- |
| | | | | | | | | | 0998-x) |
| | | | | | | COV2- | 3640 | QQSYSTPY | Seth Zost et al., 2020 |
| | | | | | | 2250 | | T | (https://www.nature.com/ |
| | | | | | | | | | articles/s41591-020- |
| | | | | | | | | | 0998-x) |
| | | | | | | COV2- | 3641 | LLYYGGA | Seth Zost et al., 2020 |
| | | | | | | 2251 | | WV | (https://www.nature.com/ |
| | | | | | | | | | articles/s41591-020- |
| | | | | | | | | | 0998-x) |
| | | | | | | COV2- | 3642 | QSYDGSN | Seth Zost et al., 2020 |
| | | | | | | 2253 | | HAW | (https://www.nature.com/ |
| | | | | | | | | | articles/s41591-020- |
| | | | | | | | | | 0998-x) |
| | | | | | | COV2- | 3643 | QVWDSSS | Seth Zost et al., 2020 |
| | | | | | | 2256 | | DPW | (https://www.nature.com/ |
| | | | | | | | | | articles/s41591-020- |
| | | | | | | | | | 0998-x) |
| | | | | | | COV2- | 3644 | MQALQTP | Seth Zost et al., 2020 |
| | | | | | | 2257 | | QT | (https://www.nature.com/ |
| | | | | | | | | | articles/s41591-020- |
| | | | | | | | | | 0998-x) |
| | | | | | | COV2- | 3645 | QQYGGSLT | Seth Zost et al., 2020 |
| | | | | | | 2258 | | | (https://www.nature.com/ |
| | | | | | | | | | articles/s41591-020- |
| | | | | | | | | | 0998-x) |
| | | | | | | COV2- | 3646 | QAWDSSL | Seth Zost et al., 2020 |
| | | | | | | 2260 | | W | (https://www.nature.com/ |
| | | | | | | | | | articles/s41591-020- |
| | | | | | | | | | 0998-x) |
| | | | | | | COV2- | 3647 | SSYTSSSLR | Seth Zost et al., 2020 |
| | | | | | | 2262 | | V | (https://www.nature.com/ |
| | | | | | | | | | articles/s41591-020- |
| | | | | | | | | | 0998-x) |
| | | | | | | COV2- | 3648 | QQLNSYPV | Seth Zost et al., 2020 |
| | | | | | | 2263 | | T | (https://www.nature.com/ |
| | | | | | | | | | articles/s41591-020- |
| | | | | | | | | | 0998-x) |
| | | | | | | COV2- | 3649 | CSYAGSYT | Seth Zost et al., 2020 |
| | | | | | | 2266 | | YV | (https://www.nature.com/ |
| | | | | | | | | | articles/s41591-020- |
| | | | | | | | | | 0998-x) |
| | | | | | | COV2- | 3650 | SSYTSSSTL | Seth Zost et al., 2020 |
| | | | | | | 2268 | | VL | (https://www.nature.com/ |
| | | | | | | | | | articles/s41591-020- |
| | | | | | | | | | 0998-x) |
| | | | | | | COV2- | 3651 | QQRSNWP | Seth Zost et al., 2020 |
| | | | | | | 2270 | | PSYT | (https://www.nature.com/ |
| | | | | | | | | | articles/s41591-020- |
| | | | | | | | | | 0998-x) |
| | | | | | | COV2- | 3652 | SSYTSISTW | Seth Zost et al., 2020 |
| | | | | | | 2273 | | V | (https://www.nature.com/ |
| | | | | | | | | | articles/s41591-020- |
| | | | | | | | | | 0998-x) |
| | | | | | | COV2- | 3653 | FSMDSSG | Seth Zost et al., 2020 |
| | | | | | | 2274 | | DLRV | (https://www.nature.com/ |
| | | | | | | | | | articles/s41591-020- |
| | | | | | | | | | 0998-x) |
| | | | | | | COV2- | 3654 | QQSYSTPG | Seth Zost et al., 2020 |
| | | | | | | 2277 | | LT | (https://www.nature.com/ |
| | | | | | | | | | articles/s41591-020- |
| | | | | | | | | | 0998-x) |
| | | | | | | COV2- | 3655 | ISYTSSRTL | Seth Zost et al., 2020 |
| | | | | | | 2281 | | V | (https://www.nature.com/ |
| | | | | | | | | | articles/s41591-020- |
| | | | | | | | | | 0998-x) |
| | | | | | | COV2- | 3656 | QVWDSSY | Seth Zost et al., 2020 |
| | | | | | | 2287 | | YHPW | (https://www.nature.com/ |
| | | | | | | | | | articles/s41591-020- |
| | | | | | | | | | 0998-x) |
| | | | | | | COV2- | 3657 | LVWDDSL | Seth Zost et al., 2020 |
| | | | | | | 2290 | | NGLV | (https://www.nature.com/ |
| | | | | | | | | | articles/s41591-020- |
| | | | | | | | | | 0998-x) |
| | | | | | | COV2- | 3658 | GTWDSSLS | Seth Zost et al., 2020 |
| | | | | | | 2293 | | AW | (https://www.nature.com/ |
| | | | | | | | | | articles/s41591-020- |
| | | | | | | | | | 0998-x) |
| | | | | | | COV2- | 3659 | QQYSIYSW | Seth Zost et al., 2020 |
| | | | | | | 2296 | | T | (https://www.nature.com/ |
| | | | | | | | | | articles/s41591-020- |
| | | | | | | | | | 0998-x) |
| | | | | | | COV2- | 3660 | QQSYSTP | Seth Zost et al., 2020 |
| | | | | | | 2299 | | WT | (https://www.nature.com/ |
| | | | | | | | | | articles/s41591-020- |
| | | | | | | | | | 0998-x) |
| | | | | | | COV2- | 3661 | QQANSLPL | Seth Zost et al., 2020 |
| | | | | | | 2300 | | T | (https://www.nature.com/ |
| | | | | | | | | | articles/s41591-020- |
| | | | | | | | | | 0998-x) |
| | | | | | | COV2- | 3662 | AAWDDSL | Seth Zost et al., 2020 |
| | | | | | | 2304 | | NGW | (https://www.nature.com/ |
| | | | | | | | | | articles/s41591-020- |
| | | | | | | | | | 0998-x) |
| | | | | | | COV2- | 3663 | AAWDDSL | Seth Zost et al., 2020 |
| | | | | | | 2305 | | NGWV | (https://www.nature.com/ |
| | | | | | | | | | articles/s41591-020- |
| | | | | | | | | | 0998-x) |
| | | | | | | COV2- | 3664 | QAWDSST | Seth Zost et al., 2020 |
| | | | | | | 2307 | | AV | (https://www.nature.com/ |
| | | | | | | | | | articles/s41591-020- |
| | | | | | | | | | 0998-x) |
| | | | | | | COV2- | 3665 | HQYNNWP | Seth Zost et al., 2020 |
| | | | | | | 2308 | | QT | (https://www.nature.com/ |
| | | | | | | | | | articles/s41591-020- |
| | | | | | | | | | 0998-x) |
| | | | | | | COV2- | 3666 | QQSYSTLT | Seth Zost et al., 2020 |
| | | | | | | 2310 | | | (https://www.nature.com/ |
| | | | | | | | | | articles/s41591-020- |
| | | | | | | | | | 0998-x) |
| | | | | | | COV2- | 3667 | QHRSNWP | Seth Zost et al., 2020 |
| | | | | | | 2313 | | PRLT | (https://www.nature.com/ |
| | | | | | | | | | articles/s41591-020- |
| | | | | | | | | | 0998-x) |
| | | | | | | COV2- | 3668 | QQSYSTPG | Seth Zost et al., 2020 |
| | | | | | | 2318 | | T | (https://www.nature.com/ |
| | | | | | | | | | articles/s41591-020- |
| | | | | | | | | | 0998-x) |
| | | | | | | COV2- | 3669 | QQYGSSYT | Seth Zost et al., 2020 |
| | | | | | | 2322 | | | (https://www.nature.com/ |
| | | | | | | | | | articles/s41591-020- |
| | | | | | | | | | 0998-x) |
| | | | | | | COV2- | 3670 | QQTYSTF | Seth Zost et al., 2020 |
| | | | | | | 2325 | | WT | (https://www.nature.com/ |
| | | | | | | | | | articles/s41591-020- |
| | | | | | | | | | 0998-x) |
| | | | | | | COV2- | 3671 | AAWDDSL | Seth Zost et al., 2020 |
| | | | | | | 2329 | | SSWV | (https://www.nature.com/ |
| | | | | | | | | | articles/s41591-020- |
| | | | | | | | | | 0998-x) |
| | | | | | | COV2- | 3672 | QSYDSGNP | Seth Zost et al., 2020 |
| | | | | | | 2331 | | | (https://www.nature.com/ |
| | | | | | | | | | articles/s41591-020- |
| | | | | | | | | | 0998-x) |
| | | | | | | COV2- | 3673 | QAWSSST | Seth Zost et al., 2020 |
| | | | | | | 2333 | | AV | (https://www.nature.com/ |
| | | | | | | | | | articles/s41591-020- |
| | | | | | | | | | 0998-x) |
| | | | | | | COV2- | 3674 | SSYTSSTLN | Seth Zost et al., 2020 |
| | | | | | | 2335 | | VL | (https://www.nature.com/ |
| | | | | | | | | | articles/s41591-020- |
| | | | | | | | | | 0998-x) |
| | | | | | | COV2- | 3675 | QQSYSTPG | Seth Zost et al., 2020 |
| | | | | | | 2337 | | T | (https://www.nature.com/ |
| | | | | | | | | | articles/s41591-020- |
| | | | | | | | | | 0998-x) |
| | | | | | | COV2- | 3676 | QSYDSSLS | Seth Zost et al., 2020 |
| | | | | | | 2340 | | GWSV | (https://www.nature.com/ |
| | | | | | | | | | articles/s41591-020- |
| | | | | | | | | | 0998-x) |
| | | | | | | COV2- | 3677 | SSYTSSSTL | Seth Zost et al., 2020 |
| | | | | | | 2341 | | LYV | (https://www.nature.com/ |
| | | | | | | | | | articles/s41591-020- |
| | | | | | | | | | 0998-x) |
| | | | | | | COV2- | 3678 | QQSYSTH | Seth Zost et al., 2020 |
| | | | | | | 2342 | | MST | (https://www.nature.com/ |
| | | | | | | | | | articles/s41591-020- |
| | | | | | | | | | 0998-x) |
| | | | | | | COV2- | 3679 | MQSIQLA | Seth Zost et al., 2020 |
| | | | | | | 2343 | | | (https://www.nature.com/ |
| | | | | | | | | | articles/s41591-020- |
| | | | | | | | | | 0998-x) |
| | | | | | | COV2- | 3680 | QQYNYWP | Seth Zost et al., 2020 |
| | | | | | | 2346 | | PLT | (https://www.nature.com/ |
| | | | | | | | | | articles/s41591-020- |
| | | | | | | | | | 0998-x) |
| | | | | | | COV2- | 3681 | SSGDSSTD | Seth Zost et al., 2020 |
| | | | | | | 2351 | | HHVV | (https://www.nature.com/ |
| | | | | | | | | | articles/s41591-020- |
| | | | | | | | | | 0998-x) |
| | | | | | | COV2- | 3682 | HQSYGVPI | Seth Zost et al., 2020 |
| | | | | | | 2352 | | T | (https://www.nature.com/ |
| | | | | | | | | | articles/s41591-020- |
| | | | | | | | | | 0998-x) |
| | | | | | | COV2- | 3683 | QQYNNWP | Seth Zost et al., 2020 |
| | | | | | | 2353 | | PMYT | (https://www.nature.com/ |
| | | | | | | | | | articles/s41591-020- |
| | | | | | | | | | 0998-x) |
| | | | | | | COV2- | 3684 | QSYDSSKY | Seth Zost et al., 2020 |
| | | | | | | 2354 | | W | (https://www.nature.com/ |
| | | | | | | | | | articles/s41591-020- |
| | | | | | | | | | 0998-x) |
| | | | | | | COV2- | 3685 | QQYGSSP | Seth Zost et al., 2020 |
| | | | | | | 2355 | | WT | (https://www.nature.com/ |
| | | | | | | | | | articles/s41591-020- |
| | | | | | | | | | 0998-x) |
| | | | | | | COV2- | 3686 | MQALQTP | Seth Zost et al., 2020 |
| | | | | | | 2357 | | LYT | (https://www.nature.com/ |
| | | | | | | | | | articles/s41591-020- |
| | | | | | | | | | 0998-x) |
| | | | | | | COV2- | 3687 | QQSYSSLSI | Seth Zost et al., 2020 |
| | | | | | | 2358 | | T | (https://www.nature.com/ |
| | | | | | | | | | articles/s41591-020- |
| | | | | | | | | | 0998-x) |
| | | | | | | COV2- | 3688 | HKRSNWP | Seth Zost et al., 2020 |
| | | | | | | 2367 | | PSLT | (https://www.nature.com/ |
| | | | | | | | | | articles/s41591-020- |
| | | | | | | | | | 0998-x) |
| | | | | | | COV2- | 3689 | QSTASSGT | Seth Zost et al., 2020 |
| | | | | | | 2368 | | YVV | (https://www.nature.com/ |
| | | | | | | | | | articles/s41591-020- |
| | | | | | | | | | 0998-x) |
| | | | | | | COV2- | 3690 | QQYNSYSP | Seth Zost et al., 2020 |
| | | | | | | 2369 | | T | (https://www.nature.com/ |
| | | | | | | | | | articles/s41591-020- |
| | | | | | | | | | 0998-x) |
| | | | | | | COV2- | 3691 | QSYDGINR | Seth Zost et al., 2020 |
| | | | | | | 2370 | | WLV | (https://www.nature.com/ |
| | | | | | | | | | articles/s41591-020- |
| | | | | | | | | | 0998-x) |
| | | | | | | COV2- | 3692 | QQYNNWP | Seth Zost et al., 2020 |
| | | | | | | 2371 | | GT | (https://www.nature.com/ |
| | | | | | | | | | articles/s41591-020- |
| | | | | | | | | | 0998-x) |
| | | | | | | COV2- | 3693 | QQYGSSPP | Seth Zost et al., 2020 |
| | | | | | | 2373 | | | (https://www.nature.com/ |
| | | | | | | | | | articles/s41591-020- |
| | | | | | | | | | 0998-x) |
| | | | | | | COV2- | 3694 | GADHGSG | Seth Zost et al., 2020 |
| | | | | | | 2378 | | SNFVYVV | (https://www.nature.com/ |
| | | | | | | | | | articles/s41591-020- |
| | | | | | | | | | 0998-x) |
| | | | | | | COV2- | 3695 | QHFGSSSQ | Seth Zost et al., 2020 |
| | | | | | | 2381 | | WT | (https://www.nature.com/ |
| | | | | | | | | | articles/s41591-020- |
| | | | | | | | | | 0998-x) |
| | | | | | | COV2- | 3696 | LLYYGGPW | Seth Zost et al., 2020 |
| | | | | | | 2382 | | V | (https://www.nature.com/ |
| | | | | | | | | | articles/s41591-020- |
| | | | | | | | | | 0998-x) |
| | | | | | | COV2- | 3697 | QQYNNWP | Seth Zost et al., 2020 |
| | | | | | | 2383 | | LA | (https://www.nature.com/ |
| | | | | | | | | | articles/s41591-020- |
| | | | | | | | | | 0998-x) |
| | | | | | | COV2- | 3698 | CSYAGGNT | Seth Zost et al., 2020 |
| | | | | | | 2384 | | FVV | (https://www.nature.com/ |
| | | | | | | | | | articles/s41591-020- |
| | | | | | | | | | 0998-x) |
| | | | | | | COV2- | 3699 | QQYNNWP | Seth Zost et al., 2020 |
| | | | | | | 2386 | | RT | (https://www.nature.com/ |
| | | | | | | | | | articles/s41591-020- |
| | | | | | | | | | 0998-x) |
| | | | | | | COV2- | 3700 | SSYTSSSTP | Seth Zost et al., 2020 |
| | | | | | | 2387 | | W | (https://www.nature.com/ |
| | | | | | | | | | articles/s41591-020- |
| | | | | | | | | | 0998-x) |
| | | | | | | COV2- | 3701 | MQALQTP | Seth Zost et al., 2020 |
| | | | | | | 2388 | | RT | (https://www.nature.com/ |
| | | | | | | | | | articles/s41591-020- |
| | | | | | | | | | 0998-x) |
| | | | | | | COV2- | 3702 | QQSYSTP | Seth Zost et al., 2020 |
| | | | | | | 2389 | | WT | (https://www.nature.com/ |
| | | | | | | | | | articles/s41591-020- |
| | | | | | | | | | 0998-x) |
| | | | | | | COV2- | 3703 | AVWDDSL | Seth Zost et al., 2020 |
| | | | | | | 2391 | | NGLV | (https://www.nature.com/ |
| | | | | | | | | | articles/s41591-020- |
| | | | | | | | | | 0998-x) |
| | | | | | | COV2- | 3704 | QQCYNWP | Seth Zost et al., 2020 |
| | | | | | | 2394 | | PWT | (https://www.nature.com/ |
| | | | | | | | | | articles/s41591-020- |
| | | | | | | | | | 0998-x) |
| | | | | | | COV2- | 3705 | QAWDSST | Seth Zost et al., 2020 |
| | | | | | | 2397 | | GV | (https://www.nature.com/ |
| | | | | | | | | | articles/s41591-020- |
| | | | | | | | | | 0998-x) |
| | | | | | | COV2- | 3706 | QQYHNLP | Seth Zost et al., 2020 |
| | | | | | | 2399 | | RT | (https://www.nature.com/ |
| | | | | | | | | | articles/s41591-020- |
| | | | | | | | | | 0998-x) |
| | | | | | | COV2- | 3707 | QQLNSYPF | Seth Zost et al., 2020 |
| | | | | | | 2400 | | T | (https://www.nature.com/ |
| | | | | | | | | | articles/s41591-020- |
| | | | | | | | | | 0998-x) |
| | | | | | | COV2- | 3708 | QQYYSISW | Seth Zost et al., 2020 |
| | | | | | | 2401 | | T | (https://www.nature.com/ |
| | | | | | | | | | articles/s41591-020- |
| | | | | | | | | | 0998-x) |
| | | | | | | COV2- | 3709 | SSYTSSSTL | Seth Zost et al., 2020 |
| | | | | | | 2403 | | YV | (https://www.nature.com/ |
| | | | | | | | | | articles/s41591-020- |
| | | | | | | | | | 0998-x) |
| | | | | | | COV2- | 3710 | QKYNSAP | Seth Zost et al., 2020 |
| | | | | | | 2405 | | WT | (https://www.nature.com/ |
| | | | | | | | | | articles/s41591-020- |
| | | | | | | | | | 0998-x) |
| | | | | | | COV2- | 3711 | QAWDSST | Seth Zost et al., 2020 |
| | | | | | | 2406 | | GV | (https://www.nature.com/ |
| | | | | | | | | | articles/s41591-020- |
| | | | | | | | | | 0998-x) |
| | | | | | | COV2- | 3712 | QQLNSYPI | Seth Zost et al., 2020 |
| | | | | | | 2408 | | T | (https://www.nature.com/ |
| | | | | | | | | | articles/s41591-020- |
| | | | | | | | | | 0998-x) |
| | | | | | | COV2- | 3713 | AVWDDSL | Seth Zost et al., 2020 |
| | | | | | | 2413 | | NGLV | (https://www.nature.com/ |
| | | | | | | | | | articles/s41591-020- |
| | | | | | | | | | 0998-x) |
| | | | | | | COV2- | 3714 | AAWDDSL | Seth Zost et al., 2020 |
| | | | | | | 2416 | | NGW | (https://www.nature.com/ |
| | | | | | | | | | articles/s41591-020- |
| | | | | | | | | | 0998-x) |
| | | | | | | COV2- | 3715 | QQSYTTLL | Seth Zost et al., 2020 |
| | | | | | | 2417 | | T | (https://www.nature.com/ |
| | | | | | | | | | articles/s41591-020- |
| | | | | | | | | | 0998-x) |
| | | | | | | COV2- | 3716 | SSYTSTSTP | Seth Zost et al., 2020 |
| | | | | | | 2418 | | WV | (https://www.nature.com/ |
| | | | | | | | | | articles/s41591-020- |
| | | | | | | | | | 0998-x) |
| | | | | | | COV2- | 3717 | QQYHVWP | Seth Zost et al., 2020 |
| | | | | | | 2420 | | PIT | (https://www.nature.com/ |
| | | | | | | | | | articles/s41591-020- |
| | | | | | | | | | 0998-x) |
| | | | | | | COV2- | 3718 | QQYYSTPL | Seth Zost et al., 2020 |
| | | | | | | 2422 | | T | (https://www.nature.com/ |
| | | | | | | | | | articles/s41591-020- |
| | | | | | | | | | 0998-x) |
| | | | | | | COV2- | 3719 | QQGNSFPL | Seth Zost et al., 2020 |
| | | | | | | 2427 | | T | (https://www.nature.com/ |
| | | | | | | | | | articles/s41591-020- |
| | | | | | | | | | 0998-x) |
| | | | | | | COV2- | 3720 | QSYDSSLS | Seth Zost et al., 2020 |
| | | | | | | 2428 | | AWV | (https://www.nature.com/ |
| | | | | | | | | | articles/s41591-020- |
| | | | | | | | | | 0998-x) |
| | | | | | | COV2- | 3721 | QQYNTYS | Seth Zost et al., 2020 |
| | | | | | | 2429 | | QT | (https://www.nature.com/ |
| | | | | | | | | | articles/s41591-020- |
| | | | | | | | | | 0998-x) |
| | | | | | | COV2- | 3722 | QQRSNWP | Seth Zost et al., 2020 |
| | | | | | | 2430 | | PGVT | (https://www.nature.com/ |
| | | | | | | | | | articles/s41591-020- |
| | | | | | | | | | 0998-x) |
| | | | | | | COV2- | 3723 | HQYDYLPY | Seth Zost et al., 2020 |
| | | | | | | 2434 | | T | (https://www.nature.com/ |
| | | | | | | | | | articles/s41591-020- |
| | | | | | | | | | 0998-x) |
| | | | | | | COV2- | 3724 | QQTYSTPL | Seth Zost et al., 2020 |
| | | | | | | 2438 | | | (https://www.nature.com/ |
| | | | | | | | | | articles/s41591-020- |
| | | | | | | | | | 0998-x) |
| | | | | | | COV2- | 3725 | QHRTNWP | Seth Zost et al., 2020 |
| | | | | | | 2441 | | PLFT | (https://www.nature.com/ |
| | | | | | | | | | articles/s41591-020- |
| | | | | | | | | | 0998-x) |
| | | | | | | COV2- | 3726 | QSADSSGT | Seth Zost et al., 2020 |
| | | | | | | 2444 | | YVV | (https://www.nature.com/ |
| | | | | | | | | | articles/s41591-020- |
| | | | | | | | | | 0998-x) |
| | | | | | | COV2- | 3727 | QQYNTYSG | Seth Zost et al., 2020 |
| | | | | | | 2445 | | T | (https://www.nature.com/ |
| | | | | | | | | | articles/s41591-020- |
| | | | | | | | | | 0998-x) |
| | | | | | | COV2- | 3728 | GADHGSG | Seth Zost et al., 2020 |
| | | | | | | 2446 | | SNFVFVV | (https://www.nature.com/ |
| | | | | | | | | | articles/s41591-020- |
| | | | | | | | | | 0998-x) |
| | | | | | | COV2- | 3729 | QQYYSPP | Seth Zost et al., 2020 |
| | | | | | | 2449 | | WT | (https://www.nature.com/ |
| | | | | | | | | | articles/s41591-020- |
| | | | | | | | | | 0998-x) |
| | | | | | | COV2- | 3730 | QQYHNLP | Seth Zost et al., 2020 |
| | | | | | | 2450 | | PIT | (https://www.nature.com/ |
| | | | | | | | | | articles/s41591-020- |
| | | | | | | | | | 0998-x) |
| | | | | | | COV2- | 3731 | QAWDSST | Seth Zost et al., 2020 |
| | | | | | | 2451 | | GGV | (https://www.nature.com/ |
| | | | | | | | | | articles/s41591-020- |
| | | | | | | | | | 0998-x) |
| | | | | | | COV2- | 3732 | QQYDNLP | Seth Zost et al., 2020 |
| | | | | | | 2453 | | PGVSTT | (https://www.nature.com/ |
| | | | | | | | | | articles/s41591-020- |
| | | | | | | | | | 0998-x) |
| | | | | | | COV2- | 3733 | CSTDSSGN | Seth Zost et al., 2020 |
| | | | | | | 2454 | | QRV | (https://www.nature.com/ |
| | | | | | | | | | articles/s41591-020- |
| | | | | | | | | | 0998-x) |
| | | | | | | COV2- | 3734 | SSYTSSSTH | Seth Zost et al., 2020 |
| | | | | | | 2455 | | W | (https://www.nature.com/ |
| | | | | | | | | | articles/s41591-020- |
| | | | | | | | | | 0998-x) |
| | | | | | | COV2- | 3735 | QSADTIGT | Seth Zost et al., 2020 |
| | | | | | | 2458 | | YWV | (https://www.nature.com/ |
| | | | | | | | | | articles/s41591-020- |
| | | | | | | | | | 0998-x) |
| | | | | | | COV2- | 3736 | QQYNNWP | Seth Zost et al., 2020 |
| | | | | | | 2459 | | PMYT | (https://www.nature.com/ |
| | | | | | | | | | articles/s41591-020- |
| | | | | | | | | | 0998-x) |
| | | | | | | COV2- | 3737 | QQYDNLYS | Seth Zost et al., 2020 |
| | | | | | | 2461 | | VH | (https://www.nature.com/ |
| | | | | | | | | | articles/s41591-020- |
| | | | | | | | | | 0998-x) |
| | | | | | | COV2- | 3738 | QQSYEMP | Seth Zost et al., 2020 |
| | | | | | | 2462 | | PWT | (https://www.nature.com/ |
| | | | | | | | | | articles/s41591-020- |
| | | | | | | | | | 0998-x) |
| | | | | | | COV2- | 3739 | QSADSSGY | Seth Zost et al., 2020 |
| | | | | | | 2464 | | V | (https://www.nature.com/ |
| | | | | | | | | | articles/s41591-020- |
| | | | | | | | | | 0998-x) |
| | | | | | | COV2- | 3740 | SSYTSSSIPY | Seth Zost et al., 2020 |
| | | | | | | 2465 | | V | (https://www.nature.com/ |
| | | | | | | | | | articles/s41591-020- |
| | | | | | | | | | 0998-x) |
| | | | | | | COV2- | 3741 | QQRGNW | Seth Zost et al., 2020 |
| | | | | | | 2466 | | WT | (https://www.nature.com/ |
| | | | | | | | | | articles/s41591-020- |
| | | | | | | | | | 0998-x) |
| | | | | | | COV2- | 3742 | YSTDTSGN | Seth Zost et al., 2020 |
| | | | | | | 2473 | | HWV | (https://www.nature.com/ |
| | | | | | | | | | articles/s41591-020- |
| | | | | | | | | | 0998-x) |
| | | | | | | COV2- | 3743 | YSTDSSGN | Seth Zost et al., 2020 |
| | | | | | | 2474 | | HRV | (https://www.nature.com/ |
| | | | | | | | | | articles/s41591-020- |
| | | | | | | | | | 0998-x) |
| | | | | | | COV2- | 3744 | HQYGTSPY | Seth Zost et al., 2020 |
| | | | | | | 2478 | | T | (https://www.nature.com/ |
| | | | | | | | | | articles/s41591-020- |
| | | | | | | | | | 0998-x) |
| | | | | | | COV2- | 3745 | QQYNNFLT | Seth Zost et al., 2020 |
| | | | | | | 2479 | | | (https://www.nature.com/ |
| | | | | | | | | | articles/s41591-020- |
| | | | | | | | | | 0998-x) |
| | | | | | | COV2- | 3746 | QQYYSTPG | Seth Zost et al., 2020 |
| | | | | | | 2481 | | | (https://www.nature.com/ |
| | | | | | | | | | articles/s41591-020- |
| | | | | | | | | | 0998-x) |
| | | | | | | COV2- | 3747 | QSYDSSLS | Seth Zost et al., 2020 |
| | | | | | | 2485 | | DSV | (https://www.nature.com/ |
| | | | | | | | | | articles/s41591-020- |
| | | | | | | | | | 0998-x) |
| | | | | | | COV2- | 3748 | QSADSSGT | Seth Zost et al., 2020 |
| | | | | | | 2488 | | SWV | (https://www.nature.com/ |
| | | | | | | | | | articles/s41591-020- |
| | | | | | | | | | 0998-x) |
| | | | | | | COV2- | 3749 | QQYGSSPF | Seth Zost et al., 2020 |
| | | | | | | 2489 | | T | (https://www.nature.com/ |
| | | | | | | | | | articles/s41591-020- |
| | | | | | | | | | 0998-x) |
| | | | | | | COV2- | 3750 | QQYNSYSL | Seth Zost et al., 2020 |
| | | | | | | 2490 | | T | (https://www.nature.com/ |
| | | | | | | | | | articles/s41591-020- |
| | | | | | | | | | 0998-x) |
| | | | | | | COV2- | 3751 | QQYNNW | Seth Zost et al., 2020 |
| | | | | | | 2495 | | WRT | (https://www.nature.com/ |
| | | | | | | | | | articles/s41591-020- |
| | | | | | | | | | 0998-x) |
| | | | | | | COV2- | 3752 | YSTDSSGN | Seth Zost et al., 2020 |
| | | | | | | 2496 | | HWV | (https://www.nature.com/ |
| | | | | | | | | | articles/s41591-020- |
| | | | | | | | | | 0998-x) |
| | | | | | | COV2- | 3753 | NFRDSSGH | Seth Zost et al., 2020 |
| | | | | | | 2499 | | HPV | (https://www.nature.com/ |
| | | | | | | | | | articles/s41591-020- |
| | | | | | | | | | 0998-x) |
| | | | | | | COV2- | 3754 | AAWDDSL | Seth Zost et al., 2020 |
| | | | | | | 2504 | | NALV | (https://www.nature.com/ |
| | | | | | | | | | articles/s41591-020- |
| | | | | | | | | | 0998-x) |
| | | | | | | COV2- | 3755 | QQYNNWP | Seth Zost et al., 2020 |
| | | | | | | 2509 | | GT | (https://www.nature.com/ |
| | | | | | | | | | articles/s41591-020- |
| | | | | | | | | | 0998-x) |
| | | | | | | COV2- | 3756 | YSAADNN | Seth Zost et al., 2020 |
| | | | | | | 2510 | | RV | (https://www.nature.com/ |
| | | | | | | | | | articles/s41591-020- |
| | | | | | | | | | 0998-x) |
| | | | | | | COV2- | 3757 | NSRDSSGN | Seth Zost et al., 2020 |
| | | | | | | 2514 | | AW | (https://www.nature.com/ |
| | | | | | | | | | articles/s41591-020- |
| | | | | | | | | | 0998-x) |
| | | | | | | COV2- | 3758 | QQYDNLLL | Seth Zost et al., 2020 |
| | | | | | | 2515 | | | (https://www.nature.com/ |
| | | | | | | | | | articles/s41591-020- |
| | | | | | | | | | 0998-x) |
| | | | | | | COV2- | 3759 | QQRSNWP | Seth Zost et al., 2020 |
| | | | | | | 2516 | | PRTWT | (https://www.nature.com/ |
| | | | | | | | | | articles/s41591-020- |
| | | | | | | | | | 0998-x) |
| | | | | | | COV2- | 3760 | HYRSNWP | Seth Zost et al., 2020 |
| | | | | | | 2517 | | PVLT | (https://www.nature.com/ |
| | | | | | | | | | articles/s41591-020- |
| | | | | | | | | | 0998-x) |
| | | | | | | COV2- | 3761 | NSRDSSGN | Seth Zost et al., 2020 |
| | | | | | | 2518 | | AW | (https://www.nature.com/ |
| | | | | | | | | | articles/s41591-020- |
| | | | | | | | | | 0998-x) |
| | | | | | | COV2- | 3762 | NSRDSSGY | Seth Zost et al., 2020 |
| | | | | | | 2520 | | IWGWM | (https://www.nature.com/ |
| | | | | | | | | | articles/s41591-020- |
| | | | | | | | | | 0998-x) |
| | | | | | | COV2- | 3763 | QVWDSSS | Seth Zost et al., 2020 |
| | | | | | | 2521 | | DHWV | (https://www.nature.com/ |
| | | | | | | | | | articles/s41591-020- |
| | | | | | | | | | 0998-x) |
| | | | | | | COV2- | 3764 | QSYDSSLG | Seth Zost et al., 2020 |
| | | | | | | 2524 | | AL | (https://www.nature.com/ |
| | | | | | | | | | articles/s41591-020- |
| | | | | | | | | | 0998-x) |
| | | | | | | COV2- | 3765 | QSWDTGI | Seth Zost et al., 2020 |
| | | | | | | 2525 | | GV | (https://www.nature.com/ |
| | | | | | | | | | articles/s41591-020- |
| | | | | | | | | | 0998-x) |
| | | | | | | COV2- | 3766 | QAWDSST | Seth Zost et al., 2020 |
| | | | | | | 2526 | | W | (https://www.nature.com/ |
| | | | | | | | | | articles/s41591-020- |
| | | | | | | | | | 0998-x) |
| | | | | | | COV2- | 3767 | CSYVGSST | Seth Zost et al., 2020 |
| | | | | | | 2527 | | YVV | (https://www.nature.com/ |
| | | | | | | | | | articles/s41591-020- |
| | | | | | | | | | 0998-x) |
| | | | | | | COV2- | 3768 | QSADSSSH | Seth Zost et al., 2020 |
| | | | | | | 2529 | | WV | (https://www.nature.com/ |
| | | | | | | | | | articles/s41591-020- |
| | | | | | | | | | 0998-x) |
| | | | | | | COV2- | 3769 | QSFDSGNV | Seth Zost et al., 2020 |
| | | | | | | 2531 | | V | (https://www.nature.com/ |
| | | | | | | | | | articles/s41591-020- |
| | | | | | | | | | 0998-x) |
| | | | | | | COV2- | 3770 | VAWDDSR | Seth Zost et al., 2020 |
| | | | | | | 2532 | | NGLV | (https://www.nature.com/ |
| | | | | | | | | | articles/s41591-020- |
| | | | | | | | | | 0998-x) |
| | | | | | | COV2- | 3771 | QQYYSTRT | Seth Zost et al., 2020 |
| | | | | | | 2533 | | | (https://www.nature.com/ |
| | | | | | | | | | articles/s41591-020- |
| | | | | | | | | | 0998-x) |
| | | | | | | COV2- | 3772 | QQYYSTPP | Seth Zost et al., 2020 |
| | | | | | | 2536 | | | (https://www.nature.com/ |
| | | | | | | | | | articles/s41591-020- |
| | | | | | | | | | 0998-x) |
| | | | | | | COV2- | 3773 | LAWDDSL | Seth Zost et al., 2020 |
| | | | | | | 2539 | | NGLV | (https://www.nature.com/ |
| | | | | | | | | | articles/s41591-020- |
| | | | | | | | | | 0998-x) |
| | | | | | | COV2- | 3774 | AAWDASL | Seth Zost et al., 2020 |
| | | | | | | 2545 | | SGWV | (https://www.nature.com/ |
| | | | | | | | | | articles/s41591-020- |
| | | | | | | | | | 0998-x) |
| | | | | | | COV2- | 3775 | QSVDGSGS | Seth Zost et al., 2020 |
| | | | | | | 2546 | | SVV | (https://www.nature.com/ |
| | | | | | | | | | articles/s41591-020- |
| | | | | | | | | | 0998-x) |
| | | | | | | COV2- | 3776 | QAWDSST | Seth Zost et al., 2020 |
| | | | | | | 2549 | | HVV | (https://www.nature.com/ |
| | | | | | | | | | articles/s41591-020- |
| | | | | | | | | | 0998-x) |
| | | | | | | COV2- | 3777 | SSYTSSSTP | Seth Zost et al., 2020 |
| | | | | | | 2551 | | FV | (https://www.nature.com/ |
| | | | | | | | | | articles/s41591-020- |
| | | | | | | | | | 0998-x) |
| | | | | | | COV2- | 3778 | ETWDSNT | Seth Zost et al., 2020 |
| | | | | | | 2552 | | RV | (https://www.nature.com/ |
| | | | | | | | | | articles/s41591-020- |
| | | | | | | | | | 0998-x) |
| | | | | | | COV2- | 3779 | QQSYSTP | Seth Zost et al., 2020 |
| | | | | | | 2553 | | MHT | (https://www.nature.com/ |
| | | | | | | | | | articles/s41591-020- |
| | | | | | | | | | 0998-x) |
| | | | | | | COV2- | 3780 | QQLNSYLG | Seth Zost et al., 2020 |
| | | | | | | 2554 | | T | (https://www.nature.com/ |
| | | | | | | | | | articles/s41591-020- |
| | | | | | | | | | 0998-x) |
| | | | | | | COV2- | 3781 | QQANSFPP | Seth Zost et al., 2020 |
| | | | | | | 2558 | | T | (https://www.nature.com/ |
| | | | | | | | | | articles/s41591-020- |
| | | | | | | | | | 0998-x) |
| | | | | | | COV2- | 3782 | LVWDDSL | Seth Zost et al., 2020 |
| | | | | | | 2562 | | NGLV | (https://www.nature.com/ |
| | | | | | | | | | articles/s41591-020- |
| | | | | | | | | | 0998-x) |
| | | | | | | COV2- | 3783 | CSYAGSST | Seth Zost et al., 2020 |
| | | | | | | 2563 | | WG | (https://www.nature.com/ |
| | | | | | | | | | articles/s41591-020- |
| | | | | | | | | | 0998-x) |
| | | | | | | COV2- | 3784 | QVWDSSS | Seth Zost et al., 2020 |
| | | | | | | 2564 | | DHHW | (https://www.nature.com/ |
| | | | | | | | | | articles/s41591-020- |
| | | | | | | | | | 0998-x) |
| | | | | | | COV2- | 3785 | MQALQTP | Seth Zost et al., 2020 |
| | | | | | | 2565 | | LT | (https://www.nature.com/ |
| | | | | | | | | | articles/s41591-020- |
| | | | | | | | | | 0998-x) |
| | | | | | | COV2- | 3786 | QQYNNWP | Seth Zost et al., 2020 |
| | | | | | | 2570 | | PMYT | (https://www.nature.com/ |
| | | | | | | | | | articles/s41591-020- |
| | | | | | | | | | 0998-x) |
| | | | | | | COV2- | 3787 | QQYNNWP | Seth Zost et al., 2020 |
| | | | | | | 2571 | | RT | (https://www.nature.com/ |
| | | | | | | | | | articles/s41591-020- |
| | | | | | | | | | 0998-x) |
| | | | | | | COV2- | 3788 | QTWGT | Seth Zost et al., 2020 |
| | | | | | | 2574 | | | (https://www.nature.com/ |
| | | | | | | | | | articles/s41591-020- |
| | | | | | | | | | 0998-x) |
| | | | | | | COV2- | 3789 | MQSIQPPL | Seth Zost et al., 2020 |
| | | | | | | 2582 | | T | (https://www.nature.com/ |
| | | | | | | | | | articles/s41591-020- |
| | | | | | | | | | 0998-x) |
| | | | | | | COV2- | 3790 | QQYYSTPL | Seth Zost et al., 2020 |
| | | | | | | 2583 | | T | (https://www.nature.com/ |
| | | | | | | | | | articles/s41591-020- |
| | | | | | | | | | 0998-x) |
| | | | | | | COV2- | 3791 | SSFTSRGAL | Seth Zost et al., 2020 |
| | | | | | | 2584 | | VL | (https://www.nature.com/ |
| | | | | | | | | | articles/s41591-020- |
| | | | | | | | | | 0998-x) |
| | | | | | | COV2- | 3792 | CSYAGIWV | Seth Zost et al., 2020 |
| | | | | | | 2585 | | | (https://www.nature.com/ |
| | | | | | | | | | articles/s41591-020- |
| | | | | | | | | | 0998-x) |
| | | | | | | COV2- | 3793 | QHYGSSRS | Seth Zost et al., 2020 |
| | | | | | | 2586 | | T | (https://www.nature.com/ |
| | | | | | | | | | articles/s41591-020- |
| | | | | | | | | | 0998-x) |
| | | | | | | COV2- | 3794 | QQSYSTPT | Seth Zost et al., 2020 |
| | | | | | | 2587 | | | (https://www.nature.com/ |
| | | | | | | | | | articles/s41591-020- |
| | | | | | | | | | 0998-x) |
| | | | | | | COV2- | 3795 | QQSYSTPY | Seth Zost et al., 2020 |
| | | | | | | 2589 | | T | (https://www.nature.com/ |
| | | | | | | | | | articles/s41591-020- |
| | | | | | | | | | 0998-x) |
| | | | | | | COV2- | 3796 | NSRDSSGN | Seth Zost et al., 2020 |
| | | | | | | 2590 | | HLRV | (https://www.nature.com/ |
| | | | | | | | | | articles/s41591-020- |
| | | | | | | | | | 0998-x) |
| | | | | | | COV2- | 3797 | QQYGRSPI | Seth Zost et al., 2020 |
| | | | | | | 2602 | | T | (https://www.nature.com/ |
| | | | | | | | | | articles/s41591-020- |
| | | | | | | | | | 0998-x) |
| | | | | | | COV2- | 3798 | QQYDNLL | Seth Zost et al., 2020 |
| | | | | | | 2610 | | QFT | (https://www.nature.com/ |
| | | | | | | | | | articles/s41591-020- |
| | | | | | | | | | 0998-x) |
| | | | | | | COV2- | 3799 | YSTDSSGN | Seth Zost et al., 2020 |
| | | | | | | 2611 | | V | (https://www.nature.com/ |
| | | | | | | | | | articles/s41591-020- |
| | | | | | | | | | 0998-x) |
| | | | | | | COV2- | 3800 | QQYNSYSL | Seth Zost et al., 2020 |
| | | | | | | 2614 | | T | (https://www.nature.com/ |
| | | | | | | | | | articles/s41591-020- |
| | | | | | | | | | 0998-x) |
| | | | | | | COV2- | 3801 | QYYGSSPF | Seth Zost et al., 2020 |
| | | | | | | 2616 | | G | (https://www.nature.com/ |
| | | | | | | | | | articles/s41591-020- |
| | | | | | | | | | 0998-x) |
| | | | | | | COV2- | 3802 | QQRSNWP | Seth Zost et al., 2020 |
| | | | | | | 2617 | | PRLT | (https://www.nature.com/ |
| | | | | | | | | | articles/s41591-020- |
| | | | | | | | | | 0998-x) |
| | | | | | | COV2- | 3803 | AVWDDSL | Seth Zost et al., 2020 |
| | | | | | | 2618 | | NGVV | (https://www.nature.com/ |
| | | | | | | | | | articles/s41591-020- |
| | | | | | | | | | 0998-x) |
| | | | | | | COV2- | 3804 | LVWDDSL | Seth Zost et al., 2020 |
| | | | | | | 2619 | | NGLV | (https://www.nature.com/ |
| | | | | | | | | | articles/s41591-020- |
| | | | | | | | | | 0998-x) |
| | | | | | | COV2- | 3805 | SSYTSSRAV | Seth Zost et al., 2020 |
| | | | | | | 2620 | | L | (https://www.nature.com/ |
| | | | | | | | | | articles/s41591-020- |
| | | | | | | | | | 0998-x) |
| | | | | | | COV2- | 3806 | QQYYSSH | Seth Zost et al., 2020 |
| | | | | | | 2621 | | WT | (https://www.nature.com/ |
| | | | | | | | | | articles/s41591-020- |
| | | | | | | | | | 0998-x) |
| | | | | | | COV2- | 3807 | YSYAGSST | Seth Zost et al., 2020 |
| | | | | | | 2622 | | WV | (https://www.nature.com/ |
| | | | | | | | | | articles/s41591-020- |
| | | | | | | | | | 0998-x) |
| | | | | | | COV2- | 3808 | QSTDSSGS | Seth Zost et al., 2020 |
| | | | | | | 2624 | | YVV | (https://www.nature.com/ |
| | | | | | | | | | articles/s41591-020- |
| | | | | | | | | | 0998-x) |
| | | | | | | COV2- | 3809 | HQSYFTPQ | Seth Zost et al., 2020 |
| | | | | | | 2628 | | T | (https://www.nature.com/ |
| | | | | | | | | | articles/s41591-020- |
| | | | | | | | | | 0998-x) |
| | | | | | | COV2- | 3810 | QQYGNSP | Seth Zost et al., 2020 |
| | | | | | | 2631 | | | (https://www.nature.com/ |
| | | | | | | | | | articles/s41591-020- |
| | | | | | | | | | 0998-x) |
| | | | | | | COV2- | 3811 | QQYVEPPF | Seth Zost et al., 2020 |
| | | | | | | 2632 | | T | (https://www.nature.com/ |
| | | | | | | | | | articles/s41591-020- |
| | | | | | | | | | 0998-x) |
| | | | | | | COV2- | 3812 | SAYAGSNN | Seth Zost et al., 2020 |
| | | | | | | 2639 | | LV | (https://www.nature.com/ |
| | | | | | | | | | articles/s41591-020- |
| | | | | | | | | | 0998-x) |
| | | | | | | COV2- | 3813 | QQYGSSYT | Seth Zost et al., 2020 |
| | | | | | | 2641 | | | (https://www.nature.com/ |
| | | | | | | | | | articles/s41591-020- |
| | | | | | | | | | 0998-x) |
| | | | | | | COV2- | 3814 | QQSYSTPG | Seth Zost et al., 2020 |
| | | | | | | 2643 | | T | (https://www.nature.com/ |
| | | | | | | | | | articles/s41591-020- |
| | | | | | | | | | 0998-x) |
| | | | | | | COV2- | 3815 | QQYGRSS | Seth Zost et al., 2020 |
| | | | | | | 2656 | | GT | (https://www.nature.com/ |
| | | | | | | | | | articles/s41591-020- |
| | | | | | | | | | 0998-x) |
| | | | | | | COV2- | 3816 | QQYGSSPL | Seth Zost et al., 2020 |
| | | | | | | 2660 | | IT | (https://www.nature.com/ |
| | | | | | | | | | articles/s41591-020- |
| | | | | | | | | | 0998-x) |
| | | | | | | COV2- | 3817 | QQYYTAPL | Seth Zost et al., 2020 |
| | | | | | | 2669 | | T | (https://www.nature.com/ |
| | | | | | | | | | articles/s41591-020- |
| | | | | | | | | | 0998-x) |
| | | | | | | COV2- | 3818 | LLYYGGA | Seth Zost et al., 2020 |
| | | | | | | 2673 | | WV | (https://www.nature.com/ |
| | | | | | | | | | articles/s41591-020- |
| | | | | | | | | | 0998-x) |
| | | | | | | COV2- | 3819 | HQSSSLPP | Seth Zost et al., 2020 |
| | | | | | | 2675 | | T | (https://www.nature.com/ |
| | | | | | | | | | articles/s41591-020- |
| | | | | | | | | | 0998-x) |
| | | | | | | COV2- | 3820 | QRRSNWP | Seth Zost et al., 2020 |
| | | | | | | 2676 | | PFT | (https://www.nature.com/ |
| | | | | | | | | | articles/s41591-020- |
| | | | | | | | | | 0998-x) |
| | | | | | | COV2- | 3821 | QSYDSSNY | Seth Zost et al., 2020 |
| | | | | | | 2677 | | WV | (https://www.nature.com/ |
| | | | | | | | | | articles/s41591-020- |
| | | | | | | | | | 0998-x) |
| | | | | | | COV2- | 3822 | NSRDSSGN | Seth Zost et al., 2020 |
| | | | | | | 2678 | | AW | (https://www.nature.com/ |
| | | | | | | | | | articles/s41591-020- |
| | | | | | | | | | 0998-x) |
| | | | | | | COV2- | 3823 | QQYYSSPY | Seth Zost et al., 2020 |
| | | | | | | 2681 | | T | (https://www.nature.com/ |
| | | | | | | | | | articles/s41591-020- |
| | | | | | | | | | 0998-x) |
| | | | | | | COV2- | 3824 | QQYNNW | Seth Zost et al., 2020 |
| | | | | | | 2684 | | WRT | (https://www.nature.com/ |
| | | | | | | | | | articles/s41591-020- |
| | | | | | | | | | 0998-x) |
| | | | | | | COV2- | 3825 | QQYGSSPR | Seth Zost et al., 2020 |
| | | | | | | 2685 | | LT | (https://www.nature.com/ |
| | | | | | | | | | articles/s41591-020- |
| | | | | | | | | | 0998-x) |
| | | | | | | COV2- | 3826 | AVWDDSL | Seth Zost et al., 2020 |
| | | | | | | 2693 | | NGLV | (https://www.nature.com/ |
| | | | | | | | | | articles/s41591-020- |
| | | | | | | | | | 0998-x) |
| | | | | | | COV2- | 3827 | QSYDSSLN | Seth Zost et al., 2020 |
| | | | | | | 2694 | | GDV | (https://www.nature.com/ |
| | | | | | | | | | articles/s41591-020- |
| | | | | | | | | | 0998-x) |
| | | | | | | COV2- | 3828 | QQRSNWP | Seth Zost et al., 2020 |
| | | | | | | 2697 | | LIFT | (https://www.nature.com/ |
| | | | | | | | | | articles/s41591-020- |
| | | | | | | | | | 0998-x) |
| | | | | | | COV2- | 3829 | QSYDSSLS | Seth Zost et al., 2020 |
| | | | | | | 2700 | | GYV | (https://www.nature.com/ |
| | | | | | | | | | articles/s41591-020- |
| | | | | | | | | | 0998-x) |
| | | | | | | COV2- | 3830 | QQSYSTPPI | Seth Zost et al., 2020 |
| | | | | | | 2703 | | T | (https://www.nature.com/ |
| | | | | | | | | | articles/s41591-020- |
| | | | | | | | | | 0998-x) |
| | | | | | | COV2- | 3831 | QQSYSTPP | Seth Zost et al., 2020 |
| | | | | | | 2705 | | WT | (https://www.nature.com/ |
| | | | | | | | | | articles/s41591-020- |
| | | | | | | | | | 0998-x) |
| | | | | | | COV2- | 3832 | QQYANLPF | Seth Zost et al., 2020 |
| | | | | | | 2709 | | T | (https://www.nature.com/ |
| | | | | | | | | | articles/s41591-020- |
| | | | | | | | | | 0998-x) |
| | | | | | | COV2- | 3833 | VAWDDSR | Seth Zost et al., 2020 |
| | | | | | | 2710 | | NGLV | (https://www.nature.com/ |
| | | | | | | | | | articles/s41591-020- |
| | | | | | | | | | 0998-x) |
| | | | | | | COV2- | 3834 | QSVDSSGT | Seth Zost et al., 2020 |
| | | | | | | 2713 | | YPHVI | (https://www.nature.com/ |
| | | | | | | | | | articles/s41591-020- |
| | | | | | | | | | 0998-x) |
| | | | | | | COV2- | 3835 | QQSYSTPY | Seth Zost et al., 2020 |
| | | | | | | 2717 | | T | (https://www.nature.com/ |
| | | | | | | | | | articles/s41591-020- |
| | | | | | | | | | 0998-x) |
| | | | | | | COV2- | 3836 | QQLNSYPL | Seth Zost et al., 2020 |
| | | | | | | 2718 | | T | (https://www.nature.com/ |
| | | | | | | | | | articles/s41591-020- |
| | | | | | | | | | 0998-x) |
| | | | | | | COV2- | 3837 | TSYTSSSTL | Seth Zost et al., 2020 |
| | | | | | | 2722 | | NW | (https://www.nature.com/ |
| | | | | | | | | | articles/s41591-020- |
| | | | | | | | | | 0998-x) |
| | | | | | | COV2- | 3838 | CSYASSSIV | Seth Zost et al., 2020 |
| | | | | | | 2726 | | V | (https://www.nature.com/ |
| | | | | | | | | | articles/s41591-020- |
| | | | | | | | | | 0998-x) |
| | | | | | | COV2- | 3839 | QQSYSTPP | Seth Zost et al., 2020 |
| | | | | | | 2730 | | WT | (https://www.nature.com/ |
| | | | | | | | | | articles/s41591-020- |
| | | | | | | | | | 0998-x) |
| | | | | | | COV2- | 3840 | QQLNSYSF | Seth Zost et al., 2020 |
| | | | | | | 2733 | | ET | (https://www.nature.com/ |
| | | | | | | | | | articles/s41591-020- |
| | | | | | | | | | 0998-x) |
| | | | | | | COV2- | 3841 | QSYDGINR | Seth Zost et al., 2020 |
| | | | | | | 2734 | | WLV | (https://www.nature.com/ |
| | | | | | | | | | articles/s41591-020- |
| | | | | | | | | | 0998-x) |
| | | | | | | COV2- | 3842 | QQYNSYPY | Seth Zost et al., 2020 |
| | | | | | | 2736 | | T | (https://www.nature.com/ |
| | | | | | | | | | articles/s41591-020- |
| | | | | | | | | | 0998-x) |
| | | | | | | COV2- | 3843 | QQSSSSPIT | Seth Zost et al., 2020 |
| | | | | | | 2740 | | | (https://www.nature.com/ |
| | | | | | | | | | articles/s41591-020- |
| | | | | | | | | | 0998-x) |
| | | | | | | COV2- | 3844 | QQSYTTLL | Seth Zost et al., 2020 |
| | | | | | | 2749 | | T | (https://www.nature.com/ |
| | | | | | | | | | articles/s41591-020- |
| | | | | | | | | | 0998-x) |
| | | | | | | COV2- | 3845 | QVWDGIN | Seth Zost et al., 2020 |
| | | | | | | 2751 | | DRW | (https://www.nature.com/ |
| | | | | | | | | | articles/s41591-020- |
| | | | | | | | | | 0998-x) |
| | | | | | | COV2- | 3846 | QQYDNLP | Seth Zost et al., 2020 |
| | | | | | | 2752 | | PV | (https://www.nature.com/ |
| | | | | | | | | | articles/s41591-020- |
| | | | | | | | | | 0998-x) |
| | | | | | | COV2- | 3847 | QQSYSSE | Seth Zost et al., 2020 |
| | | | | | | 2753 | | WT | (https://www.nature.com/ |
| | | | | | | | | | articles/s41591-020- |
| | | | | | | | | | 0998-x) |
| | | | | | | COV2- | 3848 | QSYDISLG | Seth Zost et al., 2020 |
| | | | | | | 2756 | | GWV | (https://www.nature.com/ |
| | | | | | | | | | articles/s41591-020- |
| | | | | | | | | | 0998-x) |
| | | | | | | COV2- | 3849 | QQSYSMP | Seth Zost et al., 2020 |
| | | | | | | 2758 | | PIT | (https://www.nature.com/ |
| | | | | | | | | | articles/s41591-020- |
| | | | | | | | | | 0998-x) |
| | | | | | | COV2- | 3850 | AAWDDSL | Seth Zost et al., 2020 |
| | | | | | | 2759 | | NGSWV | (https://www.nature.com/ |
| | | | | | | | | | articles/s41591-020- |
| | | | | | | | | | 0998-x) |
| | | | | | | COV2- | 3851 | AAWDDSL | Seth Zost et al., 2020 |
| | | | | | | 2760 | | SGLI | (https://www.nature.com/ |
| | | | | | | | | | articles/s41591-020- |
| | | | | | | | | | 0998-x) |
| | | | | | | COV2- | 3852 | CSYAGSST | Seth Zost et al., 2020 |
| | | | | | | 2762 | | WL | (https://www.nature.com/ |
| | | | | | | | | | articles/s41591-020- |
| | | | | | | | | | 0998-x) |
| | | | | | | COV2- | 3853 | QVWDSSS | Seth Zost et al., 2020 |
| | | | | | | 2765 | | DHHW | (https://www.nature.com/ |
| | | | | | | | | | articles/s41591-020- |
| | | | | | | | | | 0998-x) |
| | | | | | | COV2- | 3854 | VAWDDSR | Seth Zost et al., 2020 |
| | | | | | | 2767 | | NGLV | (https://www.nature.com/ |
| | | | | | | | | | articles/s41591-020- |
| | | | | | | | | | 0998-x) |
| | | | | | | COV2- | 3855 | GTWDSSLS | Seth Zost et al., 2020 |
| | | | | | | 2768 | | AYV | (https://www.nature.com/ |
| | | | | | | | | | articles/s41591-020- |
| | | | | | | | | | 0998-x) |
| | | | | | | COV2- | 3856 | QVWDSSS | Seth Zost et al., 2020 |
| | | | | | | 2769 | | DHPGV | (https://www.nature.com/ |
| | | | | | | | | | articles/s41591-020- |
| | | | | | | | | | 0998-x) |
| | | | | | | COV2- | 3857 | QAWGSSR | Seth Zost et al., 2020 |
| | | | | | | 2774 | | GV | (https://www.nature.com/ |
| | | | | | | | | | articles/s41591-020- |
| | | | | | | | | | 0998-x) |
| | | | | | | COV2- | 3858 | NSRDNSG | Seth Zost et al., 2020 |
| | | | | | | 2776 | | NLNWV | (https://www.nature.com/ |
| | | | | | | | | | articles/s41591-020- |
| | | | | | | | | | 0998-x) |
| | | | | | | COV2- | 3859 | QQYDNLPY | Seth Zost et al., 2020 |
| | | | | | | 2780 | | T | (https://www.nature.com/ |
| | | | | | | | | | articles/s41591-020- |
| | | | | | | | | | 0998-x) |
| | | | | | | COV2- | 3860 | QSADSSGS | Seth Zost et al., 2020 |
| | | | | | | 2783 | | R | (https://www.nature.com/ |
| | | | | | | | | | articles/s41591-020- |
| | | | | | | | | | 0998-x) |
| | | | | | | COV2- | 3861 | QQYNNWP | Seth Zost et al., 2020 |
| | | | | | | 2784 | | | (https://www.nature.com/ |
| | | | | | | | | | articles/s41591-020- |
| | | | | | | | | | 0998-x) |
| | | | | | | COV2- | 3862 | QQSYEIPP | Seth Zost et al., 2020 |
| | | | | | | 2786 | | WT | (https://www.nature.com/ |
| | | | | | | | | | articles/s41591-020- |
| | | | | | | | | | 0998-x) |
| | | | | | | COV2- | 3863 | ATWDDSL | Seth Zost et al., 2020 |
| | | | | | | 2789 | | NGPV | (https://www.nature.com/ |
| | | | | | | | | | articles/s41591-020- |
| | | | | | | | | | 0998-x) |
| | | | | | | COV2- | 3864 | QSYDSRLS | Seth Zost et al., 2020 |
| | | | | | | 2790 | | GFW | (https://www.nature.com/ |
| | | | | | | | | | articles/s41591-020- |
| | | | | | | | | | 0998-x) |
| | | | | | | COV2- | 3865 | QSADSSGT | Seth Zost et al., 2020 |
| | | | | | | 2794 | | SVL | (https://www.nature.com/ |
| | | | | | | | | | articles/s41591-020- |
| | | | | | | | | | 0998-x) |
| | | | | | | COV2- | 3866 | CSYARSSTR | Seth Zost et al., 2020 |
| | | | | | | 2796 | | V | (https://www.nature.com/ |
| | | | | | | | | | articles/s41591-020- |
| | | | | | | | | | 0998-x) |
| | | | | | | COV2- | 3867 | QSADSRG | Seth Zost et al., 2020 |
| | | | | | | 2797 | | AV | (https://www.nature.com/ |
| | | | | | | | | | articles/s41591-020- |
| | | | | | | | | | 0998-x) |
| | | | | | | COV2- | 3868 | AVWDDSL | Seth Zost et al., 2020 |
| | | | | | | 2801 | | HSYV | (https://www.nature.com/ |
| | | | | | | | | | articles/s41591-020- |
| | | | | | | | | | 0998-x) |
| | | | | | | COV2- | 3869 | QQSYSTPR | Seth Zost et al., 2020 |
| | | | | | | 2807 | | T | (https://www.nature.com/ |
| | | | | | | | | | articles/s41591-020- |
| | | | | | | | | | 0998-x) |
| | | | | | | COV2- | 3870 | QQYDNLPL | Seth Zost et al., 2020 |
| | | | | | | 2808 | | | (https://www.nature.com/ |
| | | | | | | | | | articles/s41591-020- |
| | | | | | | | | | 0998-x) |
| | | | | | | COV2- | 3871 | QQSYTTLL | Seth Zost et al., 2020 |
| | | | | | | 2809 | | T | (https://www.nature.com/ |
| | | | | | | | | | articles/s41591-020- |
| | | | | | | | | | 0998-x) |
| | | | | | | COV2- | 3872 | QSYDSSLS | Seth Zost et al., 2020 |
| | | | | | | 2811 | | GWV | (https://www.nature.com/ |
| | | | | | | | | | articles/s41591-020- |
| | | | | | | | | | 0998-x) |
| | | | | | | COV2- | 3873 | QQYANLPF | Seth Zost et al., 2020 |
| | | | | | | 2812 | | T | (https://www.nature.com/ |
| | | | | | | | | | articles/s41591-020- |
| | | | | | | | | | 0998-x) |
| | | | | | | COV2- | 3874 | QQYDNLP | Seth Zost et al., 2020 |
| | | | | | | 2813 | | RT | (https://www.nature.com/ |
| | | | | | | | | | articles/s41591-020- |
| | | | | | | | | | 0998-x) |
| | | | | | | COV2- | 3875 | QSYDSSLS | Seth Zost et al., 2020 |
| | | | | | | 2814 | | GYV | (https://www.nature.com/ |
| | | | | | | | | | articles/s41591-020- |
| | | | | | | | | | 0998-x) |
| | | | | | | COV2- | 3876 | CSYAVSTTY | Seth Zost et al., 2020 |
| | | | | | | 2816 | | VI | (https://www.nature.com/ |
| | | | | | | | | | articles/s41591-020- |
| | | | | | | | | | 0998-x) |
| | | | | | | COV2- | 3877 | QQSYSNPS | Seth Zost et al., 2020 |
| | | | | | | 2817 | | | (https://www.nature.com/ |
| | | | | | | | | | articles/s41591-020- |
| | | | | | | | | | 0998-x) |
| | | | | | | COV2- | 3878 | QQYGSSPP | Seth Zost et al., 2020 |
| | | | | | | 2818 | | RYT | (https://www.nature.com/ |
| | | | | | | | | | articles/s41591-020- |
| | | | | | | | | | 0998-x) |
| | | | | | | COV2- | 3879 | QQSYSTLL | Seth Zost et al., 2020 |
| | | | | | | 2819 | | | (https://www.nature.com/ |
| | | | | | | | | | articles/s41591-020- |
| | | | | | | | | | 0998-x) |
| | | | | | | COV2- | 3880 | MQALQTP | Seth Zost et al., 2020 |
| | | | | | | 2820 | | FT | (https://www.nature.com/ |
| | | | | | | | | | articles/s41591-020- |
| | | | | | | | | | 0998-x) |
| | | | | | | COV2- | 3881 | QVWDSSS | Seth Zost et al., 2020 |
| | | | | | | 2821 | | DRLYV | (https://www.nature.com/ |
| | | | | | | | | | articles/s41591-020- |
| | | | | | | | | | 0998-x) |
| | | | | | | COV2- | 3882 | QQSYSNPS | Seth Zost et al., 2020 |
| | | | | | | 2822 | | | (https://www.nature.com/ |
| | | | | | | | | | articles/s41591-020- |
| | | | | | | | | | 0998-x) |
| | | | | | | COV2- | 3883 | CSYAGSST | Seth Zost et al., 2020 |
| | | | | | | 2826 | | WL | (https://www.nature.com/ |
| | | | | | | | | | articles/s41591-020- |
| | | | | | | | | | 0998-x) |
| | | | | | | COV2- | 3884 | QSYDSTSR | Seth Zost et al., 2020 |
| | | | | | | 2828 | | W | (https://www.nature.com/ |
| | | | | | | | | | articles/s41591-020- |
| | | | | | | | | | 0998-x) |
| | | | | | | COV2- | 3885 | QVWDSGS | Seth Zost et al., 2020 |
| | | | | | | 2830 | | DHVV | (https://www.nature.com/ |
| | | | | | | | | | articles/s41591-020- |
| | | | | | | | | | 0998-x) |
| | | | | | | COV2- | 3886 | QQSYSTPQ | Seth Zost et al., 2020 |
| | | | | | | 2832 | | T | (https://www.nature.com/ |
| | | | | | | | | | articles/s41591-020- |
| | | | | | | | | | 0998-x) |
| | | | | | | COV2- | 3887 | ASWDDSLI | Seth Zost et al., 2020 |
| | | | | | | 2834 | | GPV | (https://www.nature.com/ |
| | | | | | | | | | articles/s41591-020- |
| | | | | | | | | | 0998-x) |
| | | | | | | COV2- | 3888 | QQLNSYPG | Seth Zost et al., 2020 |
| | | | | | | 2835 | | YT | (https://www.nature.com/ |
| | | | | | | | | | articles/s41591-020- |
| | | | | | | | | | 0998-x) |
| | | | | | | COV2- | 3889 | QSYDSNN | Seth Zost et al., 2020 |
| | | | | | | 2841 | | QV | (https://www.nature.com/ |
| | | | | | | | | | articles/s41591-020- |
| | | | | | | | | | 0998-x) |
| | | | | | | COV2- | 3890 | QSYDSSDV | Seth Zost et al., 2020 |
| | | | | | | 2842 | | V | (https://www.nature.com/ |
| | | | | | | | | | articles/s41591-020- |
| | | | | | | | | | 0998-x) |
| | | | | | | COV2- | 3891 | QVWDSSS | Seth Zost et al., 2020 |
| | | | | | | 2844 | | DHHW | (https://www.nature.com/ |
| | | | | | | | | | articles/s41591-020- |
| | | | | | | | | | 0998-x) |
| | | | | | | COV2- | 3892 | QSADSSGT | Seth Zost et al., 2020 |
| | | | | | | 2848 | | YRV | (https://www.nature.com/ |
| | | | | | | | | | articles/s41591-020- |
| | | | | | | | | | 0998-x) |
| | | | | | | COV2- | 3893 | QQYYNWP | Seth Zost et al., 2020 |
| | | | | | | 2853 | | LT | (https://www.nature.com/ |
| | | | | | | | | | articles/s41591-020- |
| | | | | | | | | | 0998-x) |
| | | | | | | COV2- | 3894 | QSADSSAA | Seth Zost et al., 2020 |
| | | | | | | 2863 | | YVV | (https://www.nature.com/ |
| | | | | | | | | | articles/s41591-020- |
| | | | | | | | | | 0998-x) |
| | | | | | | COV2- | 3895 | YSTDSSGK | Seth Zost et al., 2020 |
| | | | | | | 2872 | | GV | (https://www.nature.com/ |
| | | | | | | | | | articles/s41591-020- |
| | | | | | | | | | 0998-x) |
| | | | | | | COV2- | 3896 | QVWDSSS | Seth Zost et al., 2020 |
| | | | | | | 2873 | | DPFYV | (https://www.nature.com/ |
| | | | | | | | | | articles/s41591-020- |
| | | | | | | | | | 0998-x) |
| | | | | | | COV2- | 3897 | QSYDGINR | Seth Zost et al., 2020 |
| | | | | | | 2878 | | AWV | (https://www.nature.com/ |
| | | | | | | | | | articles/s41591-020- |
| | | | | | | | | | 0998-x) |
| | | | | | | COV2- | 3898 | QQYYSTP | Seth Zost et al., 2020 |
| | | | | | | 2883 | | WT | (https://www.nature.com/ |
| | | | | | | | | | articles/s41591-020- |
| | | | | | | | | | 0998-x) |
| | | | | | | COV2- | 3899 | QQYNSYSY | Seth Zost et al., 2020 |
| | | | | | | 2891 | | T | (https://www.nature.com/ |
| | | | | | | | | | articles/s41591-020- |
| | | | | | | | | | 0998-x) |
| | | | | | | COV2- | 3900 | QQYDDWP | Seth Zost et al., 2020 |
| | | | | | | 2894 | | PEVT | (https://www.nature.com/ |
| | | | | | | | | | articles/s41591-020- |
| | | | | | | | | | 0998-x) |
| | | | | | | COV2- | 3901 | VAWDDSR | Seth Zost et al., 2020 |
| | | | | | | 2901 | | NGLV | (https://www.nature.com/ |
| | | | | | | | | | articles/s41591-020- |
| | | | | | | | | | 0998-x) |
| | | | | | | COV2- | 3902 | QSFDIGRG | Seth Zost et al., 2020 |
| | | | | | | 2904 | | GWI | (https://www.nature.com/ |
| | | | | | | | | | articles/s41591-020- |
| | | | | | | | | | 0998-x) |
| | | | | | | COV2- | 3903 | QQSYSTPP | Seth Zost et al., 2020 |
| | | | | | | 2906 | | T | (https://www.nature.com/ |
| | | | | | | | | | articles/s41591-020- |
| | | | | | | | | | 0998-x) |
| | | | | | | COV2- | 3904 | QSYDSSLS | Seth Zost et al., 2020 |
| | | | | | | 2909 | | GSV | (https://www.nature.com/ |
| | | | | | | | | | articles/s41591-020- |
| | | | | | | | | | 0998-x) |
| | | | | | | COV2- | 3905 | CSYAGSVL | Seth Zost et al., 2020 |
| | | | | | | 2911 | | | (https://www.nature.com/ |
| | | | | | | | | | articles/s41591-020- |
| | | | | | | | | | 0998-x) |
| | | | | | | COV2- | 3906 | QQSFSTPR | Seth Zost et al., 2020 |
| | | | | | | 2919 | | T | (https://www.nature.com/ |
| | | | | | | | | | articles/s41591-020- |
| | | | | | | | | | 0998-x) |
| | | | | | | COV2- | 3907 | QVWDSSS | Seth Zost et al., 2020 |
| | | | | | | 2933 | | DHPEWV | (https://www.nature.co |
| | | | | | | | | | m/articles/s41591-020- |
| | | | | | | | | | 0998-x) |
| | | | | | | COV2- | 3908 | MQALQTP | Seth Zost et al., 2020 |
| | | | | | | 2934 | | WT | (https://www.nature.com/ |
| | | | | | | | | | articles/s41591-020- |
| | | | | | | | | | 0998-x) |
| | | | | | | COV2- | 3909 | NSRDSSGN | Seth Zost et al., 2020 |
| | | | | | | 2939 | | PRW | (https://www.nature.com/ |
| | | | | | | | | | articles/s41591-020- |
| | | | | | | | | | 0998-x) |
| | | | | | | COV2- | 3910 | QQYGSSPP | Seth Zost et al., 2020 |
| | | | | | | 2941 | | RYT | (https://www.nature.com/ |
| | | | | | | | | | articles/s41591-020- |
| | | | | | | | | | 0998-x) |
| | | | | | | COV2- | 3911 | QSVDSSGT | Seth Zost et al., 2020 |
| | | | | | | 2942 | | YRV | (https://www.nature.com/ |
| | | | | | | | | | articles/s41591-020- |
| | | | | | | | | | 0998-x) |
| | | | | | | COV2- | 3912 | QQYDNLPL | Seth Zost et al., 2020 |
| | | | | | | 2944 | | | (https://www.nature.com/ |
| | | | | | | | | | articles/s41591-020- |
| | | | | | | | | | 0998-x) |
| | | | | | | COV2- | 3913 | MQGTHW | Seth Zost et al., 2020 |
| | | | | | | 2945 | | PYT | (https://www.nature.com/ |
| | | | | | | | | | articles/s41591-020- |
| | | | | | | | | | 0998-x) |
| | | | | | | COV2- | 3914 | CSYAGRYT | Seth Zost et al., 2020 |
| | | | | | | 2947 | | WV | (https://www.nature.com/ |
| | | | | | | | | | articles/s41591-020- |
| | | | | | | | | | 0998-x) |
| | | | | | | COV2- | 3915 | QLLNSHPL | Seth Zost et al., 2020 |
| | | | | | | 2952 | | T | (https://www.nature.com/ |
| | | | | | | | | | articles/s41591-020- |
| | | | | | | | | | 0998-x) |
| | | | | | | COV2- | 3916 | QSADSTG | Seth Zost et al., 2020 |
| | | | | | | 2953 | | WV | (https://www.nature.com/ |
| | | | | | | | | | articles/s41591-020- |
| | | | | | | | | | 0998-x) |
| | | | | | | COV2- | 3917 | MQSIQLPY | Seth Zost et al., 2020 |
| | | | | | | 2955 | | T | (https://www.nature.com/ |
| | | | | | | | | | articles/s41591-020- |
| | | | | | | | | | 0998-x) |
| | | | | | | COV2- | 3918 | MQSIQLA | Seth Zost et al., 2020 |
| | | | | | | 2960 | | | (https://www.nature.com/ |
| | | | | | | | | | articles/s41591-020- |
| | | | | | | | | | 0998-x) |
| | | | | | | COV2- | 3919 | QHYGSSRG | Seth Zost et al., 2020 |
| | | | | | | 2961 | | WT | (https://www.nature.com/ |
| | | | | | | | | | articles/s41591-020- |
| | | | | | | | | | 0998-x) |
| | | | | | | COV2- | 3920 | QQYYNWP | Seth Zost et al., 2020 |
| | | | | | | 2997 | | LT | (https://www.nature.com/ |
| | | | | | | | | | articles/s41591-020- |
| | | | | | | | | | 0998-x) |
| | | | | | | COV2- | 3921 | QQYNSYPY | Seth Zost et al., 2020 |
| | | | | | | 3010 | | T | (https://www.nature.com/ |
| | | | | | | | | | articles/s41591-020- |
| | | | | | | | | | 0998-x) |
| | | | | | | COV2- | 3922 | QQSYEIPP | Seth Zost et al., 2020 |
| | | | | | | 3012 | | WT | (https://www.nature.com/ |
| | | | | | | | | | articles/s41591-020- |
| | | | | | | | | | 0998-x) |
| | | | | | | COV2- | 3923 | QQYANLPF | Seth Zost et al., 2020 |
| | | | | | | 3013 | | T | (https://www.nature.com/ |
| | | | | | | | | | articles/s41591-020- |
| | | | | | | | | | 0998-x) |
| | | | | | | COV2- | 3924 | QHYGSSRG | Seth Zost et al., 2020 |
| | | | | | | 3025 | | WT | (https://www.nature.com/ |
| | | | | | | | | | articles/s41591-020- |
| | | | | | | | | | 0998-x) |
| | | | | | | COV2- | 3925 | QSVDSSGT | Seth Zost et al., 2020 |
| | | | | | | 3029 | | YPHVI | (https://www.nature.com/ |
| | | | | | | | | | articles/s41591-020- |
| | | | | | | | | | 0998-x) |
| | | | | | | COV2- | 3926 | QSYASSLS | Seth Zost et al., 2020 |
| | | | | | | 3057 | | AHVV | (https://www.nature.com/ |
| | | | | | | | | | articles/s41591-020- |
| | | | | | | | | | 0998-x) |
| | | | | | | COV2- | 3927 | QQYYSSYT | Seth Zost et al., 2020 |
| | | | | | | 3058 | | | (https://www.nature.co |
| | | | | | | | | | m/articles/s41591-020- |
| | | | | | | | | | 0998-x) |
| | | | | | | COVA1- | 3928 | QQYGSSPP | Philip Brouwer et al., |
| | | | | | | 01 | | PFT | 2020 |
| | | | | | | | | | (https://science.sciencemag. |
| | | | | | | | | | org/content/early/ |
| | | | | | | | | | 2020/06/15/science.abc5902) |
| | | | | | | COVA1- | 3929 | SSYTSSSTP | Philip Brouwer et al., |
| | | | | | | 02 | | W | 2020 |
| | | | | | | | | | (https://science.sciencemag. |
| | | | | | | | | | org/content/early/ |
| | | | | | | | | | 2020/06/15/science.abc5902) |
| | | | | | | COVA1- | 3930 | QKYNSAPP | Philip Brouwer et al., |
| | | | | | | 03 | | | 2020 |
| | | | | | | | | | (https://science.sciencemag. |
| | | | | | | | | | org/content/early/ |
| | | | | | | | | | 2020/06/15/science.abc5902) |
| | | | | | | COVA1- | 3931 | QAWGSTT | Philip Brouwer et al., |
| | | | | | | 06 | | AKV | 2020 |
| | | | | | | | | | (https://science.sciencemag. |
| | | | | | | | | | org/content/early/ |
| | | | | | | | | | 2020/06/15/science.abc5902) |
| | | | | | | COVA1- | 3932 | QQRSNWP | Philip Brouwer et al., |
| | | | | | | 07 | | PRVT | 2020 |
| | | | | | | | | | (https://science.sciencemag. |
| | | | | | | | | | org/content/early/ |
| | | | | | | | | | 2020/06/15/science.abc5902) |
| | | | | | | COVA1- | 3933 | SSYTSSSTR | Philip Brouwer et al., |
| | | | | | | 08 | | HWV | 2020 |
| | | | | | | | | | (https://science.sciencemag. |
| | | | | | | | | | org/content/early/ |
| | | | | | | | | | 2020/06/15/science.abc5902) |
| | | | | | | COVA1- | 3934 | QQSYSTPY | Philip Brouwer et al., |
| | | | | | | 09 | | T | 2020 |
| | | | | | | | | | (https://science.sciencemag. |
| | | | | | | | | | org/content/early/ |
| | | | | | | | | | 2020/06/15/science.abc5902) |
| | | | | | | COVA1- | 3935 | SAYTTTSTS | Philip Brouwer et al., |
| | | | | | | 10 | | WV | 2020 |
| | | | | | | | | | (https://science.sciencemag. |
| | | | | | | | | | org/content/early/ |
| | | | | | | | | | 2020/06/15/science.abc5902) |
| | | | | | | COVA1- | 3936 | SSYVGNN | Philip Brouwer et al., |
| | | | | | | 12 | | NWV | 2020 |
| | | | | | | | | | (https://science.sciencemag. |
| | | | | | | | | | org/content/early/ |
| | | | | | | | | | 2020/06/15/science.abc5902) |
| | | | | | | COVA1- | 3937 | QQYDNPP | Philip Brouwer et al., |
| | | | | | | 16 | | LT | 2020 |
| | | | | | | | | | (https://science.sciencemag. |
| | | | | | | | | | org/content/early/ |
| | | | | | | | | | 2020/06/15/science.abc5902), |
| | | | | | | | | | Hejun Liu et al 2020 |
| | | | | | | | | | (https://www.biorxiv.or |
| | | | | | | | | | g/content/10.1101/ |
| | | | | | | | | | 2020.08.02.233536v1.full. |
| | | | | | | | | | pdf) |
| | | | | | | COVA1- | 3938 | LLSYSGVW | Philip Brouwer et al., |
| | | | | | | 18 | | V | 2020 |
| | | | | | | | | | (https://science.sciencemag. |
| | | | | | | | | | org/content/early/ |
| | | | | | | | | | 2020/06/15/science.abc5902) |
| | | | | | | COVA1- | 3939 | QQYNNWP | Philip Brouwer et al., |
| | | | | | | 19 | | PWT | 2020 |
| | | | | | | | | | (https://science.sciencemag. |
| | | | | | | | | | org/content/early/ |
| | | | | | | | | | 2020/06/15/science.abc5902) |
| | | | | | | COVA1- | 3940 | QVWDSSS | Philip Brouwer et al., |
| | | | | | | 20 | | DHWV | 2020 |
| | | | | | | | | | (https://science.sciencemag. |
| | | | | | | | | | org/content/early/ |
| | | | | | | | | | 2020/06/15/science.abc5902) |
| | | | | | | COVA1- | 3941 | QQYNNWP | Philip Brouwer et al., |
| | | | | | | 21 | | PGT | 2020 |
| | | | | | | | | | (https://science.sciencemag. |
| | | | | | | | | | org/content/early/ |
| | | | | | | | | | 2020/06/15/science.abc5902) |
| | | | | | | COVA1- | 3942 | QAWDSST | Philip Brouwer et al., |
| | | | | | | 22 | | AV | 2020 |
| | | | | | | | | | (https://science.sciencemag. |
| | | | | | | | | | org/content/early/ |
| | | | | | | | | | 2020/06/15/science.abc5902) |
| | | | | | | COVA1- | 3943 | QSADSSGT | Philip Brouwer et al., |
| | | | | | | 23 | | YSW | 2020 |
| | | | | | | | | | (https://science.sciencemag. |
| | | | | | | | | | org/content/early/ |
| | | | | | | | | | 2020/06/15/science.abc5902) |
| | | | | | | COVA1- | 3944 | QQYNSYSI | Philip Brouwer et al., |
| | | | | | | 25 | | T | 2020 |
| | | | | | | | | | (https://science.sciencemag. |
| | | | | | | | | | org/content/early/ |
| | | | | | | | | | 2020/06/15/science.abc5902) |
| | | | | | | COVA1- | 3945 | QQLHSYPL | Philip Brouwer et al., |
| | | | | | | 26 | | T | 2020 |
| | | | | | | | | | (https://science.sciencemag. |
| | | | | | | | | | org/content/early/ |
| | | | | | | | | | 2020/06/15/science.abc5902) |
| | | | | | | COVA1- | 3946 | QQYGSSPL | Philip Brouwer et al., |
| | | | | | | 27 | | | 2020 |
| | | | | | | | | | (https://science.sciencemag. |
| | | | | | | | | | org/content/early/ |
| | | | | | | | | | 2020/06/15/science.abc5902) |
| | | | | | | COVA2- | 3947 | QQSYSTPP | Philip Brouwer et al., |
| | | | | | | 01 | | VT | 2020 |
| | | | | | | | | | (https://science.sciencemag. |
| | | | | | | | | | org/content/early/ |
| | | | | | | | | | 2020/06/15/science.abc5902) |
| | | | | | | COVA2- | 3948 | QQSYSTH | Philip Brouwer et al., |
| | | | | | | 02 | | MST | 2020 |
| | | | | | | | | | (https://science.sciencemag. |
| | | | | | | | | | org/content/early/ |
| | | | | | | | | | 2020/06/15/science.abc5902) |
| | | | | | | COVA2- | 3949 | QQRSNWP | Philip Brouwer et al., |
| | | | | | | 03 | | QVT | 2020 |
| | | | | | | | | | (https://science.sciencemag. |
| | | | | | | | | | org/content/early/ |
| | | | | | | | | | 2020/06/15/science.abc5902) |
| | | | | | | COVA2- | 3950 | QQYGSLYT | Philip Brouwer et al., |
| | | | | | | 04 | | | 2020 |
| | | | | | | | | | (https://science.sciencemag. |
| | | | | | | | | | org/content/early |
| | | | | | | | | | 2020/06/15/science.abc5902); |
| | | | | | | | | | Nicholas Wu |
| | | | | | | | | | (https://www.biorxiv.org/ |
| | | | | | | | | | content/10.1101/ |
| | | | | | | | | | 2020.07.26.222232v1) |
| | | | | | | COVA2- | 3951 | QQYDNLPL | Philip Brouwer et al., |
| | | | | | | 05 | | T | 2020 |
| | | | | | | | | | (https://science.sciencemag. |
| | | | | | | | | | org/content/early/ |
| | | | | | | | | | 2020/06/15/science.abc5902) |
| | | | | | | COVA2- | 3952 | QQYGSSP | Philip Brouwer et al., |
| | | | | | | 07 | | GT | 2020 |
| | | | | | | | | | (https://science.sciencemag. |
| | | | | | | | | | org/content/early/ |
| | | | | | | | | | 2020/06/15/science.abc5902) |
| | | | | | | COVA2- | 3953 | QQYGSSLL | Philip Brouwer et al., |
| | | | | | | 10 | | T | 2020 |
| | | | | | | | | | (https://science.sciencemag. |
| | | | | | | | | | org/content/early/ |
| | | | | | | | | | 2020/06/15/science.abc5902) |
| | | | | | | COVA2- | 3954 | QQYGSSPR | Philip Brouwer et al., |
| | | | | | | 11 | | LT | 2020 |
| | | | | | | | | | (https://science.sciencemag. |
| | | | | | | | | | org/content/early/ |
| | | | | | | | | | 2020/06/15/science.abc5902) |
| | | | | | | COVA2- | 3955 | QQYNNWP | Philip Brouwer et al., |
| | | | | | | 12 | | PWT | 2020 |
| | | | | | | | | | (https://science.sciencemag. |
| | | | | | | | | | org/content/early/ |
| | | | | | | | | | 2020/06/15/science.abc5902) |
| | | | | | | COVA2- | 3956 | QQYGSSP | Philip Brouwer et al., |
| | | | | | | 13 | | GT | 2020 |
| | | | | | | | | | (https://science.sciencemag. |
| | | | | | | | | | org/content/early/ |
| | | | | | | | | | 2020/06/15/science.abc5902) |
| | | | | | | COVA2- | 3957 | QQRSNWP | Philip Brouwer et al., |
| | | | | | | 14 | | PMYT | 2020 |
| | | | | | | | | | (https://science.sciencemag. |
| | | | | | | | | | org/content/early/ |
| | | | | | | | | | 2020/06/15/science.abc5902) |
| | | | | | | COVA2- | 3958 | MQGTHW | Philip Brouwer et al., |
| | | | | | | 15 | | PRT | 2020 |
| | | | | | | | | | (https://science.sciencemag. |
| | | | | | | | | | org/content/early/ |
| | | | | | | | | | 2020/06/15/science.abc5902) |
| | | | | | | COVA2- | 3959 | LQHNSYPP | Philip Brouwer et al., |
| | | | | | | 16 | | L | 2020 |
| | | | | | | | | | (https://science.sciencemag. |
| | | | | | | | | | org/content/early/ |
| | | | | | | | | | 2020/06/15/science.abc5902) |
| | | | | | | COVA2- | 3960 | QQRSNWP | Philip Brouwer et al., |
| | | | | | | 17 | | PYT | 2020 |
| | | | | | | | | | (https://science.sciencemag. |
| | | | | | | | | | org/content/early/ |
| | | | | | | | | | 2020/06/15/science.abc5902) |
| | | | | | | COVA2- | 3961 | QQRSNWP | Philip Brouwer et al., |
| | | | | | | 18 | | PSIT | 2020 |
| | | | | | | | | | (https://science.sciencemag. |
| | | | | | | | | | org/content/early/ |
| | | | | | | | | | 2020/06/15/science.abc5902) |
| | | | | | | COVA2- | 3962 | LQHNSYL | Philip Brouwer et al., |
| | | | | | | 20 | | WT | 2020 |
| | | | | | | | | | (https://science.sciencemag. |
| | | | | | | | | | org/content/early/ |
| | | | | | | | | | 2020/06/15/science.abc5902) |
| | | | | | | COVA2- | 3963 | QQYDNLPI | Philip Brouwer et al., |
| | | | | | | 22 | | T | 2020 |
| | | | | | | | | | (https://science.sciencemag. |
| | | | | | | | | | org/content/early/ |
| | | | | | | | | | 2020/06/15/science.abc5902) |
| | | | | | | COVA2- | 3964 | QQYGSSP | Philip Brouwer et al., |
| | | | | | | 23 | | GVT | 2020 |
| | | | | | | | | | (https://science.sciencemag. |
| | | | | | | | | | org/content/early/ |
| | | | | | | | | | 2020/06/15/science.abc5902) |
| | | | | | | COVA2- | 3965 | QQSYSTPQ | Philip Brouwer et al., |
| | | | | | | 24 | | T | 2020 |
| | | | | | | | | | (https://science.sciencemag. |
| | | | | | | | | | org/content/early/ |
| | | | | | | | | | 2020/06/15/science.abc5902) |
| | | | | | | COVA2- | 3966 | SSYTSSST | Philip Brouwer et al., |
| | | | | | | 25 | | WV | 2020 |
| | | | | | | | | | (https://science.sciencemag. |
| | | | | | | | | | org/content/early/ |
| | | | | | | | | | 2020/06/15/science.abc5902) |
| | | | | | | COVA2- | 3967 | QAWDSST | Philip Brouwer et al., |
| | | | | | | 26 | | AW | 2020 |
| | | | | | | | | | (https://science.sciencemag. |
| | | | | | | | | | org/content/early/ |
| | | | | | | | | | 2020/06/15/science.abc5902) |
| | | | | | | COVA2- | 3968 | QQYNYWP | Philip Brouwer et al., |
| | | | | | | 28 | | LIT | 2020 |
| | | | | | | | | | (https://science.sciencemag. |
| | | | | | | | | | org/content/early/ |
| | | | | | | | | | 2020/06/15/science.abc5902) |
| | | | | | | COVA2- | 3969 | QQSYSTPR | Philip Brouwer et al., |
| | | | | | | 29 | | T | 2020 |
| | | | | | | | | | (https://science.sciencemag. |
| | | | | | | | | | org/content/early/ |
| | | | | | | | | | 2020/06/15/science.abc5902) |
| | | | | | | COVA2- | 3970 | QVWASSS | Philip Brouwer et al., |
| | | | | | | 30 | | W | 2020 |
| | | | | | | | | | (https://science.sciencemag. |
| | | | | | | | | | org/content/early/ |
| | | | | | | | | | 2020/06/15/science.abc5902) |
| | | | | | | COVA2- | 3971 | MQSIQLPP | Philip Brouwer et al., |
| | | | | | | 31 | | T | 2020 |
| | | | | | | | | | (https://science.sciencemag. |
| | | | | | | | | | org/content/early/ |
| | | | | | | | | | 2020/06/15/science.abc5902) |
| | | | | | | COVA2- | 3972 | QQRSNWP | Philip Brouwer et al., |
| | | | | | | 32 | | PRLT | 2020 |
| | | | | | | | | | (https://science.sciencemag. |
| | | | | | | | | | org/content/early/ |
| | | | | | | | | | 2020/06/15/science.abc5902) |
| | | | | | | COVA2- | 3973 | CSYAGSV | Philip Brouwer et al., |
| | | | | | | 33 | | | 2020 |
| | | | | | | | | | (https://science.sciencemag. |
| | | | | | | | | | org/content/early/ |
| | | | | | | | | | 2020/06/15/science.abc5902) |
| | | | | | | COVA2- | 3974 | SSYTSSSTL | Philip Brouwer et al., |
| | | | | | | 34 | | GLYV | 2020 |
| | | | | | | | | | (https://science.sciencemag. |
| | | | | | | | | | org/content/early/ |
| | | | | | | | | | 2020/06/15/science.abc5902) |
| | | | | | | COVA2- | 3975 | QSYDSSLS | Philip Brouwer et al., |
| | | | | | | 37 | | GSV | 2020 |
| | | | | | | | | | (https://science.sciencemag. |
| | | | | | | | | | org/content/early/ |
| | | | | | | | | | 2020/06/15/science.abc5902) |
| | | | | | | COVA2- | 3976 | LQHNSYPL | Philip Brouwer et al., |
| | | | | | | 38 | | T | 2020 |
| | | | | | | | | | (https://science.sciencemag. |
| | | | | | | | | | org/content/early/ |
| | | | | | | | | | 2020/06/15/science.abc5902) |
| | | | | | | COVA2- | 3977 | CSYAGSST | Philip Brouwer et al., |
| | | | | | | 39 | | WV | 2020 |
| | | | | | | | | | (https://science.sciencemag. |
| | | | | | | | | | org/content/early/ |
| | | | | | | | | | 2020/06/15/science.abc5902); |
| | | | | | | | | | Nicholas Wu |
| | | | | | | | | | (https://www.biorxiv. |
| | | | | | | | | | org/content/10.1101/ |
| | | | | | | | | | 2020.07.26.222232v1) |
| | | | | | | COVA2- | 3978 | CSYAGSST | Philip Brouwer et al., |
| | | | | | | 40 | | WV | 2020 |
| | | | | | | | | | (https://science.sciencemag. |
| | | | | | | | | | org/content/early/ |
| | | | | | | | | | 2020/06/15/science.abc5902) |
| | | | | | | COVA2- | 3979 | QQCYNWP | Philip Brouwer et al., |
| | | | | | | 41 | | PWT | 2020 |
| | | | | | | | | | (https://science.sciencemag. |
| | | | | | | | | | org/content/early/ |
| | | | | | | | | | 2020/06/15/science.abc5902) |
| | | | | | | COVA2- | 3980 | LQHNSYPL | Philip Brouwer et al., |
| | | | | | | 43 | | T | 2020 |
| | | | | | | | | | (https://science.sciencemag. |
| | | | | | | | | | org/content/early/ |
| | | | | | | | | | 2020/06/15/science.abc5902) |
| | | | | | | COVA2- | 3981 | QQSYTTFIY | Philip Brouwer et al., |
| | | | | | | 44 | | T | 2020 |
| | | | | | | | | | (https://science.sciencemag. |
| | | | | | | | | | org/content/early/ |
| | | | | | | | | | 2020/06/15/science.abc5902) |
| | | | | | | COVA2- | 3982 | QQYGSSPY | Philip Brouwer et al., |
| | | | | | | 45 | | T | 2020 |
| | | | | | | | | | (https://science.sciencemag. |
| | | | | | | | | | org/content/early/ |
| | | | | | | | | | 2020/06/15/science.abc5902) |
| | | | | | | COVA2- | 3983 | QQYDNLLS | Philip Brouwer et al., |
| | | | | | | 46 | | LT | 2020 |
| | | | | | | | | | (https://science.sciencemag. |
| | | | | | | | | | org/content/early/ |
| | | | | | | | | | 2020/06/15/science.abc5902) |
| | | | | | | COVA2- | 3984 | QQYYSTPP | Philip Brouwer et al., |
| | | | | | | 47 | | LT | 2020 |
| | | | | | | | | | (https://science.sciencemag. |
| | | | | | | | | | org/content/early/ |
| | | | | | | | | | 2020/06/15/science.abc5902) |
| | | | | | | COVA3- | 3985 | QQSYSTLT | Philip Brouwer et al., |
| | | | | | | 01 | | | 2020 |
| | | | | | | | | | (https://science.sciencemag. |
| | | | | | | | | | org/content/early/ |
| | | | | | | | | | 2020/06/15/science.abc5902) |
| | | | | | | COVA3- | 3986 | QSADSSGT | Philip Brouwer et al., |
| | | | | | | 03 | | YRV | 2020 |
| | | | | | | | | | (https://science.sciencemag. |
| | | | | | | | | | org/content/early/ |
| | | | | | | | | | 2020/06/15/science.abc5902) |
| | | | | | | COVA3- | 3987 | QVWDSSS | Philip Brouwer et al., |
| | | | | | | 04 | | DHYV | 2020 |
| | | | | | | | | | (https://science.sciencemag. |
| | | | | | | | | | org/content/early/ |
| | | | | | | | | | 2020/06/15/science.abc5902) |
| | | | | | | COVA3- | 3988 | AAWDDSL | Philip Brouwer et al., |
| | | | | | | 05 | | NGPHWV | 2020 |
| | | | | | | | | | (https://science.sciencemag. |
| | | | | | | | | | org/content/early/ |
| | | | | | | | | | 2020/06/15/science.abc5902) |
| | | | | | | COVA3- | 3989 | QQYYSTPL | Philip Brouwer et al., |
| | | | | | | 06 | | T | 2020 |
| | | | | | | | | | (https://science.sciencemag. |
| | | | | | | | | | org/content/early/ |
| | | | | | | | | | 2020/06/15/science.abc5902) |
| | | | | | | COVA3- | 3990 | QQYGSSPF | Philip Brouwer et al., |
| | | | | | | 07 | | T | 2020 |
| | | | | | | | | | (https://science.sciencemag. |
| | | | | | | | | | org/content/early/ |
| | | | | | | | | | 2020/06/15/science.abc5902) |
| | | | | | | COVA3- | 3991 | QQSYSTPL | Philip Brouwer et al., |
| | | | | | | 08 | | T | 2020 |
| | | | | | | | | | (https://science.sciencemag. |
| | | | | | | | | | org/content/early/ |
| | | | | | | | | | 2020/06/15/science.abc5902) |
| | | | | | | COVA3- | 3992 | QQSYSTLT | Philip Brouwer et al., |
| | | | | | | 09 | | | 2020 |
| | | | | | | | | | (https://science.sciencemag. |
| | | | | | | | | | org/content/early/ |
| | | | | | | | | | 2020/06/15/science.abc5902) |
| | | | | | | COVA3- | 3993 | QQYYSTPIT | Philip Brouwer et al., |
| | | | | | | 10 | | | 2020 |
| | | | | | | | | | (https://science.sciencemag. |
| | | | | | | | | | org/content/early/ |
| | | | | | | | | | 2020/06/15/science.abc5902) |
| | | | | | | CR3022 | 3994 | QQYYSTPY | Jan ter Meulen et al., |
| | | | | | | | | T | 2006 |
| | | | | | | | | | (https://journals.plos.org/ |
| | | | | | | | | | plosmedicine/article?id = |
| | | | | | | | | | 10.1371/journal.pmed. |
| | | | | | | | | | 003 0237); Meng Yuan |
| | | | | | | | | | et al., 2020a |
| | | | | | | | | | (https://science.sciencemag. |
| | | | | | | | | | org/content/early/ |
| | | | | | | | | | 2020/04/02/science.abb7269); |
| | | | | | | | | | Meng Yuan et al.,2020b |
| | | | | | | | | | (https://www.biorxiv. |
| | | | | | | | | | org/content/10.1101/ |
| | | | | | | | | | 2020.06.08.141267vl) |
| | | | | | | CV-X1- | 3995 | QQANGFP | Jakob Kreye et al., 2020 |
| | | | | | | 126 | | PL | (https://www.biorxiv.org/ |
| | | | | | | | | | content/10.1101/ |
| | | | | | | | | | 2020.08.15.252320v1.full. |
| | | | | | | | | | pdf) |
| | | | | | | CV-X2- | 3996 | QQSYSTPY | Jakob Kreye et al., 2020 |
| | | | | | | 106 | | T | (https://www.biorxiv.org/ |
| | | | | | | | | | content/10.1101/ |
| | | | | | | | | | 2020.08.15.252320v1.full. |
| | | | | | | | | | pdf) |
| | | | | | | CV05-163 | 3997 | QQRSNWP | Jakob Kreye et al., 2020 |
| | | | | | | | | PVT | (https://www.biorxiv.org/ |
| | | | | | | | | | content/10.1101/ |
| | | | | | | | | | 2020.08.15.252320v1.full. |
| | | | | | | | | | pdf) |
| | | | | | | CV07-200 | 3998 | SSYTSSSTY | Jakob Kreye et al., 2020 |
| | | | | | | | | V | (https://www.biorxiv.org/ |
| | | | | | | | | | content/10.1101/ |
| | | | | | | | | | 2020.08.15.252320v1.full. |
| | | | | | | | | | pdf) |
| | | | | | | CV07-209 | 3999 | QQYDNLPL | Jakob Kreye et al., 2020 |
| | | | | | | | | T | (https://www.biorxiv.org/ |
| | | | | | | | | | content/10.1101/ |
| | | | | | | | | | 2020.08.15.252320v1.full. |
| | | | | | | | | | pdf) |
| | | | | | | CV07-222 | 4000 | CSYAGGST | Jakob Kreye et al., 2020 |
| | | | | | | | | SYV | (https://www.biorxiv.org/ |
| | | | | | | | | | content/10.1101/ |
| | | | | | | | | | 2020.08.15.252320v1.full. |
| | | | | | | | | | pdf) |
| | | | | | | CV07-250 | 4001 | SSYAGNND | Jakob Kreye et al., 2020 |
| | | | | | | | | FV | (https://www.biorxiv.org/ |
| | | | | | | | | | content/10.1101/ |
| | | | | | | | | | 2020.08.15.252320v1.full. |
| | | | | | | | | | pdf) |
| | | | | | | CV07-255 | 4002 | CSYAGHST | Jakob Kreye et al., 2020 |
| | | | | | | | | WV | (https://www.biorxiv.org/ |
| | | | | | | | | | content/10.1101/ |
| | | | | | | | | | 2020.08.15.252320v1.full. |
| | | | | | | | | | pdf) |
| | | | | | | CV07-262 | 4003 | CSYAGTST | Jakob Kreye et al., 2020 |
| | | | | | | | | FV | (https://www.biorxiv.org/ |
| | | | | | | | | | content/10.1101/ |
| | | | | | | | | | 2020.08.15.252320v1.full. |
| | | | | | | | | | pdf) |
| | | | | | | CV07-270 | 4004 | CSYAGSSS | Jakob Kreye et al., 2020 |
| | | | | | | | | WV | (https://www.biorxiv.org/ |
| | | | | | | | | | content/10.1101/ |
| | | | | | | | | | 2020.08.15.252320v1.full. |
| | | | | | | | | | pdf) |
| | | | | | | CV07-283 | 4005 | SSYTSSSTY | Jakob Kreye et al., 2020 |
| | | | | | | | | V | (https://www.biorxiv.org/ |
| | | | | | | | | | content/10.1101/ |
| | | | | | | | | | 2020.08.15.252320v1.full. |
| | | | | | | | | | pdf) |
| | | | | | | CV07-287 | 4006 | QQYYGSSP | Jakob Kreye et al., 2020 |
| | | | | | | | | WT | (https://www.biorxiv.org/ |
| | | | | | | | | | content/10.1101/ |
| | | | | | | | | | 2020.08.15.252320v1.full. |
| | | | | | | | | | pdf) |
| | | | | | | CV07-315 | 4007 | QQSYSTHA | Jakob Kreye et al., 2020 |
| | | | | | | | | | (https://www.biorxiv.org/ |
| | | | | | | | | | content/10.1101/ |
| | | | | | | | | | 2020.08.15.252320v1.full. |
| | | | | | | | | | pdf) |
| | | | | | | CV1 | 4008 | AAWDDSL | Emilie Seydoux et al., |
| | | | | | | | | NGPV | 2020 |
| | | | | | | | | | (https://www.biorxiv.org/ |
| | | | | | | | | | content/10.1101/ |
| | | | | | | | | | 2020.05.12.091298v1) |
| | | | | | | CV10 | 4009 | QQYAGSP | Emilie Seydoux et al., |
| | | | | | | | | WT | 2020 |
| | | | | | | | | | (https://www.biorxiv.org/ |
| | | | | | | | | | content/10.1101/ |
| | | | | | | | | | 2020.05.12.091298v1) |
| | | | | | | CV11 | 4010 | QQRSNWP | Emilie Seydoux et al., |
| | | | | | | | | PIFT | 2020 |
| | | | | | | | | | (https://www.biorxiv.org/ |
| | | | | | | | | | content/10.1101/ |
| | | | | | | | | | 2020.05.12.091298v1) |
| | | | | | | CV12 | 4011 | MQGTHW | Emilie Seydoux et al., |
| | | | | | | | | PVT | 2020 |
| | | | | | | | | | (https://www.biorxiv.org/ |
| | | | | | | | | | content/10.1101/ |
| | | | | | | | | | 2020.05.12.091298v1) |
| | | | | | | CV13 | 4012 | QQSYSNPL | Emilie Seydoux et al., |
| | | | | | | | | T | 2020 |
| | | | | | | | | | (https://www.biorxiv.org/ |
| | | | | | | | | | content/10.1101/ |
| | | | | | | | | | 2020.05.12.091298v1) |
| | | | | | | CV15 | 4013 | CSYAGSYT | Emilie Seydoux et al., |
| | | | | | | | | WV | 2020 |
| | | | | | | | | | (https://www.biorxiv.org/ |
| | | | | | | | | | content/10.1101/ |
| | | | | | | | | | 2020.05.12.091298v1) |
| | | | | | | CV16 | 4014 | QQYGSSR | Emilie Seydoux et al., |
| | | | | | | | | GT | 2020 |
| | | | | | | | | | (https://www.biorxiv.org/ |
| | | | | | | | | | content/10.1101/ |
| | | | | | | | | | 2020.05.12.091298v1) |
| | | | | | | CV17 | 4015 | CSYAGSST | Emilie Seydoux et al., |
| | | | | | | | | YV | 2020 |
| | | | | | | | | | (https://www.biorxiv.org/ |
| | | | | | | | | | content/10.1101/ |
| | | | | | | | | | 2020.05.12.091298v1) |
| | | | | | | CV18 | 4016 | GTWDSSLS | Emilie Seydoux et al., |
| | | | | | | | | AGPV | 2020 |
| | | | | | | | | | (https://www.biorxiv.org/ |
| | | | | | | | | | content/10.1101/ |
| | | | | | | | | | 2020.05.12.091298v1) |
| | | | | | | CV19 | 4017 | QQYGSSPP | Emilie Seydoux et al., |
| | | | | | | | | KYT | 2020 |
| | | | | | | | | | (https://www.biorxiv.org/ |
| | | | | | | | | | content/10.1101/ |
| | | | | | | | | | 2020.05.12.091298v1) |
| | | | | | | CV2 | 4018 | QQYNNWP | Emilie Seydoux et al., |
| | | | | | | | | PSLT | 2020 |
| | | | | | | | | | (https://www.biorxiv.org/ |
| | | | | | | | | | content/10.1101/ |
| | | | | | | | | | 2020.05.12.091298v1) |
| | | | | | | CV21 | 4019 | QQRSNWP | Emilie Seydoux et al., |
| | | | | | | | | LT | 2020 |
| | | | | | | | | | (https://www.biorxiv.org/ |
| | | | | | | | | | content/10.1101/ |
| | | | | | | | | | 2020.05.12.091298v1) |
| | | | | | | CV22 | 4020 | QTWGTGI | Emilie Seydoux et al., |
| | | | | | | | | RV | 2020 |
| | | | | | | | | | (https://www.biorxiv.org/ |
| | | | | | | | | | content/10.1101/ |
| | | | | | | | | | 2020.05.12.091298v1) |
| | | | | | | CV23 | 4021 | QSADSSGT | Emilie Seydoux et al., |
| | | | | | | | | YVV | 2020 |
| | | | | | | | | | (https://www.biorxiv.org/ |
| | | | | | | | | | content/10.1101/ |
| | | | | | | | | | 2020.05.12.091298v1) |
| | | | | | | CV24 | 4022 | GTWDSSLS | Emilie Seydoux et al., |
| | | | | | | | | ASYV | 2020 |
| | | | | | | | | | (https://www.biorxiv.org/ |
| | | | | | | | | | content/10.1101/ |
| | | | | | | | | | 2020.05.12.091298v1) |
| | | | | | | CV25 | 4023 | QQYNNWP | Emilie Seydoux et al., |
| | | | | | | | | | 2020 |
| | | | | | | | | | (https://www.biorxiv.org/ |
| | | | | | | | | | content/10.1101/ |
| | | | | | | | | | 2020.05.12.091298v1) |
| | | | | | | CV26 | 4024 | LQHNSYPF | Emilie Seydoux et al., |
| | | | | | | | | T | 2020 |
| | | | | | | | | | (https://www.biorxiv.org/ |
| | | | | | | | | | content/10.1101/ |
| | | | | | | | | | 2020.05.12.091298v1) |
| | | | | | | CV27 | 4025 | SSYTSSSTP | Emilie Seydoux et al., |
| | | | | | | | | YV | 2020 |
| | | | | | | | | | (https://www.biorxiv.org/ |
| | | | | | | | | | content/10.1101/ |
| | | | | | | | | | 2020.05.12.091298v1) |
| | | | | | | CV3 | 4026 | QQSYSNPL | Emilie Seydoux et al., |
| | | | | | | | | T | 2020 |
| | | | | | | | | | (https://www.biorxiv.org/ |
| | | | | | | | | | content/10.1101/ |
| | | | | | | | | | 2020.05.12.091298v1) |
| | | | | | | CV30 | 4027 | QQYGSSP | Emilie Seydoux et al., |
| | | | | | | | | QT | 2020 |
| | | | | | | | | | (https://www.biorxiv.org/ |
| | | | | | | | | | content/10.1101/ |
| | | | | | | | | | 2020.05.12.091298v1); |
| | | | | | | | | | Nicholas Hurlburt et al., |
| | | | | | | | | | 2020 |
| | | | | | | | | | (https://www.biorxiv.or |
| | | | | | | | | | g/content/10.1101/202 |
| | | | | | | | | | 0.06.12.148692V1) |
| | | | | | | CV31 | 4028 | GTWDSSLS | Emilie Seydoux et al., |
| | | | | | | | | ASYV | 2020 |
| | | | | | | | | | (https://www.biorxiv.org/ |
| | | | | | | | | | content/10.1101/ |
| | | | | | | | | | 2020.05.12.091298v1) |
| | | | | | | CV32 | 4029 | GTWDSSLS | Emilie Seydoux et al., |
| | | | | | | | | AW | 2020 |
| | | | | | | | | | (https://www.biorxiv.org/ |
| | | | | | | | | | content/10.1101/ |
| | | | | | | | | | 2020.05.12.091298v1) |
| | | | | | | CV33 | 4030 | QSYDSSLS | Emilie Seydoux et al., |
| | | | | | | | | GPVV | 2020 |
| | | | | | | | | | (https://www.biorxiv.org/ |
| | | | | | | | | | content/10.1101/ |
| | | | | | | | | | 2020.05.12.091298v1) |
| | | | | | | CV34 | 4031 | QVWDSSS | Emilie Seydoux et al., |
| | | | | | | | | DHVV | 2020 |
| | | | | | | | | | (https://www.biorxiv.org/ |
| | | | | | | | | | content/10.1101/ |
| | | | | | | | | | 2020.05.12.091298v1) |
| | | | | | | CV35 | 4032 | AAWDDSL | Emilie Seydoux et al., |
| | | | | | | | | NGPV | 2020 |
| | | | | | | | | | (https://www.biorxiv.org/ |
| | | | | | | | | | content/10.1101/ |
| | | | | | | | | | 2020.05.12.091298v1) |
| | | | | | | CV36 | 4033 | QSADSSGT | Emilie Seydoux et al., |
| | | | | | | | | YMI | 2020 |
| | | | | | | | | | (https://www.biorxiv.org/ |
| | | | | | | | | | content/10.1101/ |
| | | | | | | | | | 2020.05.12.091298v1) |
| | | | | | | CV37 | 4034 | QQYDNLP | Emilie Seydoux et al., |
| | | | | | | | | R | 2020 |
| | | | | | | | | | (https://www.biorxiv.org/ |
| | | | | | | | | | content/10.1101/ |
| | | | | | | | | | 2020.05.12.091298v1) |
| | | | | | | CV38 | 4035 | QQRSNWP | Emilie Seydoux et al., |
| | | | | | | | | PIT | 2020 |
| | | | | | | | | | (https://www.biorxiv.org/ |
| | | | | | | | | | content/10.1101/ |
| | | | | | | | | | 2020.05.12.091298v1) |
| | | | | | | CV38-113 | 4036 | QQYDNLPS | Jakob Kreye et al., 2020 |
| | | | | | | | | WT | (https://www.biorxiv.org/ |
| | | | | | | | | | content/10.1101/ |
| | | | | | | | | | 2020.08.15.252320v1.full. |
| | | | | | | | | | pdf) |
| | | | | | | CV38-139 | 4037 | QQLNSYPP | Jakob Kreye et al., 2020 |
| | | | | | | | | GT | (https://www.biorxiv.org/ |
| | | | | | | | | | content/10.1101/ |
| | | | | | | | | | 2020.08.15.252320v1.full. |
| | | | | | | | | | pdf) |
| | | | | | | CV38-142 | 4038 | QQSYSTPR | Jakob Kreye et al., 2020 |
| | | | | | | | | QWT | (https://www.biorxiv.org/ |
| | | | | | | | | | content/10.1101/ |
| | | | | | | | | | 2020.08.15.252320v1.full. |
| | | | | | | | | | pdf) |
| | | | | | | CV38-183 | 4039 | QSYDSSLS | Jakob Kreye et al., 2020 |
| | | | | | | | | GSV | (https://www.biorxiv.org/ |
| | | | | | | | | | content/10.1101/ |
| | | | | | | | | | 2020.08.15.252320v1.full. |
| | | | | | | | | | pdf) |
| | | | | | | CV38-221 | 4040 | QQLYT | Jakob Kreye et al., 2020 |
| | | | | | | | | | (https://www.biorxiv.org/ |
| | | | | | | | | | content/10.1101/ |
| | | | | | | | | | 2020.08.15.252320v1.full. |
| | | | | | | | | | pdf) |
| | | | | | | CV39 | 4041 | MQGTHW | Emilie Seydoux et al., |
| | | | | | | | | PVT | 2020 |
| | | | | | | | | | (https://www.biorxiv.org/ |
| | | | | | | | | | content/10.1101/ |
| | | | | | | | | | 2020.05.12.091298v1) |
| | | | | | | CV4 | 4042 | QQYNSYT | Emilie Seydoux et al., |
| | | | | | | | | | 2020 |
| | | | | | | | | | (https://www.biorxiv.org/ |
| | | | | | | | | | content/10.1101/ |
| | | | | | | | | | 2020.05.12.091298v1) |
| | | | | | | CV40 | 4043 | LQHNSYPL | Emilie Seydoux et al., |
| | | | | | | | | T | 2020 |
| | | | | | | | | | (https://www.biorxiv.org/ |
| | | | | | | | | | content/10.1101/ |
| | | | | | | | | | 2020.05.12.091298v1) |
| | | | | | | CV41 | 4044 | QQYNNWP | Emilie Seydoux et al., |
| | | | | | | | | LT | 2020 |
| | | | | | | | | | (https://www.biorxiv.org/ |
| | | | | | | | | | content/10.1101/ |
| | | | | | | | | | 2020.05.12.091298v1) |
| | | | | | | CV42 | 4045 | QQTYITAF | Emilie Seydoux et al., |
| | | | | | | | | T | 2020 |
| | | | | | | | | | (https://www.biorxiv.org/ |
| | | | | | | | | | content/10.1101/ |
| | | | | | | | | | 2020.05.12.091298v1) |
| | | | | | | CV43 | 4046 | QSYDSSN | Emilie Seydoux et al., |
| | | | | | | | | WV | 2020 |
| | | | | | | | | | (https://www.biorxiv.org/ |
| | | | | | | | | | content/10.1101/ |
| | | | | | | | | | 2020.05.12.091298v1) |
| | | | | | | CV44 | 4047 | QSADSSGT | Emilie Seydoux et al., |
| | | | | | | | | YVV | 2020 |
| | | | | | | | | | (https://www.biorxiv.org/ |
| | | | | | | | | | content/10.1101/ |
| | | | | | | | | | 2020.05.12.091298v1) |
| | | | | | | CV45 | 4048 | QSYDSSLTL | Emilie Seydoux et al., |
| | | | | | | | | YV | 2020 |
| | | | | | | | | | (https://www.biorxiv.org/ |
| | | | | | | | | | content/10.1101/ |
| | | | | | | | | | 2020.05.12.091298v1) |
| | | | | | | CV46 | 4049 | MQGTHW | Emilie Seydoux et al., |
| | | | | | | | | PVT | 2020 |
| | | | | | | | | | (https://www.biorxiv.org/ |
| | | | | | | | | | content/10.1101/ |
| | | | | | | | | | 2020.05.12.091298v1) |
| | | | | | | CV47 | 4050 | LQHNSYPL | Emilie Seydoux et al., |
| | | | | | | | | T | 2020 |
| | | | | | | | | | (https://www.biorxiv.org/ |
| | | | | | | | | | content/10.1101/ |
| | | | | | | | | | 2020.05.12.091298v1) |
| | | | | | | CV48 | 4051 | MQGTHW | Emilie Seydoux et al., |
| | | | | | | | | PPT | 2020 |
| | | | | | | | | | (https://www.biorxiv.org/ |
| | | | | | | | | | content/10.1101/ |
| | | | | | | | | | 2020.05.12.091298v1) |
| | | | | | | CV5 | 4052 | QQYYITPYT | Emilie Seydoux et al., |
| | | | | | | | | | 2020 |
| | | | | | | | | | (https://www.biorxiv.org/ |
| | | | | | | | | | content/10.1101/ |
| | | | | | | | | | 2020.05.12.091298v1) |
| | | | | | | CV50 | 4053 | YSTDSSGN | Emilie Seydoux et al., |
| | | | | | | | | LYV | 2020 |
| | | | | | | | | | (https://www.biorxiv.org/ |
| | | | | | | | | | content/10.1101/ |
| | | | | | | | | | 2020.05.12.091298v1) |
| | | | | | | CV7 | 4054 | QQYNSYT | Emilie Seydoux et al., |
| | | | | | | | | | 2020 |
| | | | | | | | | | (https://www.biorxiv.org/ |
| | | | | | | | | | content/10.1101/ |
| | | | | | | | | | 2020.05.12.091298v1) |
| | | | | | | CV8 | 4055 | QQYGSSP | Emilie Seydoux et al., |
| | | | | | | | | GT | 2020 |
| | | | | | | | | | (https://www.biorxiv.org/ |
| | | | | | | | | | content/10.1101/ |
| | | | | | | | | | 2020.05.12.091298v1) |
| | | | | | | CV9 | 4056 | SSYTSISTW | Emilie Seydoux et al., |
| | | | | | | | | V | 2020 |
| | | | | | | | | | (https://www.biorxiv.org/ |
| | | | | | | | | | content/10.1101/ |
| | | | | | | | | | 2020.05.12.091298v1) |
| | | | | | | EY6A | 4057 | QQSYSTLA | Darning Zhou et al., |
| | | | | | | | | LT | 2020 |
| | | | | | | | | | (https://www.biorxiv.org/ |
| | | | | | | | | | content/10.1101/ |
| | | | | | | | | | 2020.06.12.148387V1) |
| | | | | | | Fab 2-4 | 4058 | SSYAGSNN | David Ho et al., 2020 |
| | | | | | | | | LV | (https://www.biorxiv.org/ |
| | | | | | | | | | content/10.1101/ |
| | | | | | | | | | 2020.06.17.153486V1) |
| | | | | | | FnC1t1p2_ | 4059 | QQYGSSP | Christoph Kreer et al., |
| | | | | | | A5 | | GT | 2020 |
| | | | | | | | | | (https://doi.org/10.1016/ |
| | | | | | | | | | j.cell.2020.06.044) |
| | | | | | | FnC1t2p1_ | 4060 | QQYDNLPL | Christoph Kreer et al., |
| | | | | | | D4 | | T | 2020 |
| | | | | | | | | | (https://doi.org/10.1016/ |
| | | | | | | | | | j.cell.2020.06.044) |
| | | | | | | FnC1t2p1_ | 4061 | QQYDNLPL | Christoph Kreer et al., |
| | | | | | | G5 | | T | 2020 |
| | | | | | | | | | (https://doi.org/10.1016/ |
| | | | | | | | | | j.cell.2020.06.044) |
| | | | | | | H014 | | ND | Zhe Lv et al., 2020 |
| | | | | | | | | | (https://www.biorxiv.org/ |
| | | | | | | | | | content/10.1101/ |
| | | | | | | | | | 2020.06.02.129098v2) |
| | | | | | | H11-D4 | | N/A | Jiangdong Huo et al., |
| | | | | | | | | | 2020 |
| | | | | | | | | | (https://www.nature.com/ |
| | | | | | | | | | articles/s41594-020- |
| | | | | | | | | | 0469-6) |
| | | | | | | H11-H4 | | N/A | Jiangdong Huo et al., |
| | | | | | | | | | 2020 |
| | | | | | | | | | (https://www.nature.com/ |
| | | | | | | | | | articles/s41594-020- |
| | | | | | | | | | 0469-6) |
| | | | | | | H4 | 4062 | MQRIEFPL | Yan Wu et al., 2020 |
| | | | | | | | | T | (https://science.sciencemag. |
| | | | | | | | | | org/content/early/ |
| | | | | | | | | | 2020/05/12/science.abc2241) |
| | | | | | | HbnC2t1p2_ | 4063 | QQRSNWP | Christoph Kreer et al., |
| | | | | | | D9 | | PTWT | 2020 |
| | | | | | | | | | (https://doi.org/10.1016/ |
| | | | | | | | | | j.cell.2020.06.044) |
| | | | | | | HbnC3t1p1_ | 4064 | QQYGSSP | Christoph Kreer et al., |
| | | | | | | C6 | | WT | 2020 |
| | | | | | | | | | (https://doi.org/10.1016/ |
| | | | | | | | | | j.cell.2020.06.044) |
| | | | | | | HbnC3t1p1_ | 4065 | QHYHSFPL | Christoph Kreer et al., |
| | | | | | | F4 | | T | 2020 |
| | | | | | | | | | (https://doi.org/10.1016/ |
| | | | | | | | | | j.cell.2020.06.044) |
| | | | | | | HbnC3t1p1_ | 4066 | QQYGSSPR | Christoph Kreer et al., |
| | | | | | | G4 | | T | 2020 |
| | | | | | | | | | (https://doi.org/10.1016/ |
| | | | | | | | | | j.cell.2020.06.044) |
| | | | | | | HbnC3t1p2_ | 4067 | QQYGSSPR | Christoph Kreer et al., |
| | | | | | | B10 | | T | 2020 |
| | | | | | | | | | (https://doi.org/10.1016/ |
| | | | | | | | | | j.cell.2020.06.044) |
| | | | | | | HbnC3t1p2_ | 4068 | QQYGRSP | Christoph Kreer et al., |
| | | | | | | C6 | | WT | 2020 |
| | | | | | | | | | (https://doi.org/10.1016/ |
| | | | | | | | | | j.cell.2020.06.044) |
| | | | | | | HbnC4t1p1_ | 4069 | QQSYSNPL | Christoph Kreer et al., |
| | | | | | | D5 | | T | 2020 |
| | | | | | | | | | (https://doi.org/10.1016/ |
| | | | | | | | | | j.cell.2020.06.044) |
| | | | | | | Ju et al., | | Various | Bin Ju et al., 2020 |
| | | | | | | 2020 | | | (https://www.nature.com/ |
| | | | | | | | | | articles/s41586-020- |
| | | | | | | | | | 2380-z) |
| | | | | | | Kim et | | Various | Sang II Kim et al., 2020 |
| | | | | | | al., 2020 | | | (https://www.biorxiv.org/ |
| | | | | | | | | | content/10.1101/ |
| | | | | | | | | | 2020.06.26.174557v2) |
| | | | | | | LR1 | | N/A | Tingting Li et al., 2020 |
| | | | | | | | | | (https://www.biorxiv.org/ |
| | | | | | | | | | content/10.1101/ |
| | | | | | | | | | 2020.06.09.143438v1) |
| | | | | | | LR11 | | N/A | Tingting Li et al., 2020 |
| | | | | | | | | | (https://www.biorxiv.org/ |
| | | | | | | | | | content/10.1101/ |
| | | | | | | | | | 2020.06.09.143438v1) |
| | | | | | | LR15 | | N/A | Tingting Li et al., 2020 |
| | | | | | | | | | (https://www.biorxiv.org/ |
| | | | | | | | | | content/10.1101/ |
| | | | | | | | | | 2020.06.09.143438v1) |
| | | | | | | LR16 | | N/A | Tingting Li et al., 2020 |
| | | | | | | | | | (https://www.biorxiv.org/ |
| | | | | | | | | | content/10.1101/ |
| | | | | | | | | | 2020.06.09.143438v1) |
| | | | | | | LR2 | | N/A | Tingting Li et al., 2020 |
| | | | | | | | | | (https://www.biorxiv.org/ |
| | | | | | | | | | content/10.1101/ |
| | | | | | | | | | 2020.06.09.143438v1) |
| | | | | | | LR3 | | N/A | Tingting Li et al., 2020 |
| | | | | | | | | | (https://www.biorxiv.org/ |
| | | | | | | | | | content/10.1101/ |
| | | | | | | | | | 2020.06.09.143438v1) |
| | | | | | | LR5 | | N/A | Tingting Li et al., 2020 |
| | | | | | | | | | (https://www.biorxiv.org/ |
| | | | | | | | | | content/10.1101/ |
| | | | | | | | | | 2020.06.09.143438v1) |
| | | | | | | LR6 | | N/A | Tingting Li et al., 2020 |
| | | | | | | | | | (https://www.biorxiv.org/ |
| | | | | | | | | | content/10.1101/ |
| | | | | | | | | | 2020.06.09.143438v1) |
| | | | | | | LR7 | | N/A | Tingting Li et al., 2020 |
| | | | | | | | | | (https://www.biorxiv.org/ |
| | | | | | | | | | content/10.1101/ |
| | | | | | | | | | 2020.06.09.143438v1) |
| | | | | | | LR8 | | N/A | Tingting Li et al., 2020 |
| | | | | | | | | | (https://www.biorxiv.org/ |
| | | | | | | | | | content/10.1101/ |
| | | | | | | | | | 2020.06.09.143438v1) |
| | | | | | | mAb-1 | 4070 | QSYDSSLS | Anna Wee et al., 2020 |
| | | | | | | | | VLYV | (https://science.sciencemag. |
| | | | | | | | | | org/content/early/ |
| | | | | | | | | | 2020/06/15/science.abc7424) |
| | | | | | | mAb-10 | 4071 | QQYNSWP | Anna Wee et al., 2020 |
| | | | | | | | | PLT | (https://science.sciencemag. |
| | | | | | | | | | org/content/early/ |
| | | | | | | | | | 2020/06/15/science.abc7424) |
| | | | | | | mAb-100 | 4072 | QRRGDGY | Anna Wee et al., 2020 |
| | | | | | | | | N | (https://science.sciencemag. |
| | | | | | | | | | org/content/early/ |
| | | | | | | | | | 2020/06/15/science.abc7424) |
| | | | | | | mAb-101 | 4073 | MQGTEW | Anna Wee et al., 2020 |
| | | | | | | | | PRT | (https://science.sciencemag. |
| | | | | | | | | | org/content/early/ |
| | | | | | | | | | 2020/06/15/science.abc7424) |
| | | | | | | mAb-102 | 4074 | MQGTEW | Anna Wee et al., 2020 |
| | | | | | | | | PRT | (https://science.sciencemag. |
| | | | | | | | | | org/content/early/ |
| | | | | | | | | | 2020/06/15/science.abc7424) |
| | | | | | | mAb-103 | 4075 | QQSYSTPY | Anna Wee et al., 2020 |
| | | | | | | | | T | (https://science.sciencemag. |
| | | | | | | | | | org/content/early/ |
| | | | | | | | | | 2020/06/15/science.abc7424) |
| | | | | | | mAb-104 | 4076 | CSYAGSGT | Anna Wee et al., 2020 |
| | | | | | | | | WI | (https://science.sciencemag. |
| | | | | | | | | | org/content/early/ |
| | | | | | | | | | 2020/06/15/science.abc7424) |
| | | | | | | mAb-105 | 4077 | HQYGSSP | Anna Wee et al., 2020 |
| | | | | | | | | WT | (https://science.sciencemag. |
| | | | | | | | | | org/content/early/ |
| | | | | | | | | | 2020/06/15/science.abc7424) |
| | | | | | | mAb-106 | 4078 | QRRGDGY | Anna Wee et al., 2020 |
| | | | | | | | | N | (https://science.sciencemag. |
| | | | | | | | | | org/content/early/ |
| | | | | | | | | | 2020/06/15/science.abc7424) |
| | | | | | | mAb-107 | 4079 | MQATDW | Anna Wee et al., 2020 |
| | | | | | | | | PRT | (https://science.sciencemag. |
| | | | | | | | | | org/content/early/ |
| | | | | | | | | | 2020/06/15/science.abc7424) |
| | | | | | | mAb-108 | 4080 | MQTTDWP | Anna Wee et al., 2020 |
| | | | | | | | | RT | (https://science.sciencemag. |
| | | | | | | | | | org/content/early/ |
| | | | | | | | | | 2020/06/15/science.abc7424) |
| | | | | | | mAb-109 | 4081 | MQGTEW | Anna Wee et al., 2020 |
| | | | | | | | | PRT | (https://science.sciencemag. |
| | | | | | | | | | org/content/early/ |
| | | | | | | | | | 2020/06/15/science.abc7424) |
| | | | | | | mAb-11 | 4082 | QQFEDLPI | Anna Wee et al., 2020 |
| | | | | | | | | T | (https://science.sciencemag. |
| | | | | | | | | | org/content/early/ |
| | | | | | | | | | 2020/06/15/science.abc7424) |
| | | | | | | mAb-110 | 4083 | QQYYSTPY | Anna Wee et al., 2020 |
| | | | | | | | | T | (https://science.sciencemag. |
| | | | | | | | | | org/content/early/ |
| | | | | | | | | | 2020/06/15/science.abc7424) |
| | | | | | | mAb-111 | 4084 | QQYGTSPV | Anna Wee et al., 2020 |
| | | | | | | | | | (https://science.sciencemag. |
| | | | | | | | | | org/content/early/ |
| | | | | | | | | | 2020/06/15/science.abc7424) |
| | | | | | | mAb-112 | 4085 | GTWDFSLS | Anna Wee et al., 2020 |
| | | | | | | | | AGV | (https://science.sciencemag. |
| | | | | | | | | | org/content/early/ |
| | | | | | | | | | 2020/06/15/science.abc7424) |
| | | | | | | mAb-113 | 4086 | MQGTEW | Anna Wee et al., 2020 |
| | | | | | | | | PRT | (https://science.sciencemag. |
| | | | | | | | | | org/content/early/ |
| | | | | | | | | | 2020/06/15/science.abc7424) |
| | | | | | | mAb-114 | 4087 | QQYKSPLS | Anna Wee et al., 2020 |
| | | | | | | | | | (https://science.sciencemag. |
| | | | | | | | | | org/content/early/ |
| | | | | | | | | | 2020/06/15/science.abc7424) |
| | | | | | | mAb-115 | 4088 | QQRSDWH | Anna Wee et al., 2020 |
| | | | | | | | | PIT | (https://science.sciencemag. |
| | | | | | | | | | org/content/early/ |
| | | | | | | | | | 2020/06/15/science.abc7424) |
| | | | | | | mAb-116 | 4089 | QQSYSTPG | Anna Wee et al., 2020 |
| | | | | | | | | | (https://science.sciencemag. |
| | | | | | | | | | org/content/early/ |
| | | | | | | | | | 2020/06/15/science.abc7424) |
| | | | | | | mAb-117 | 4090 | QQRAKWP | Anna Wee et al., 2020 |
| | | | | | | | | PRVT | (https://science.sciencemag. |
| | | | | | | | | | org/content/early/ |
| | | | | | | | | | 2020/06/15/science.abc7424) |
| | | | | | | mAb-118 | 4091 | QQRAKWP | Anna Wee et al., 2020 |
| | | | | | | | | PRVI | (https://science.sciencemag. |
| | | | | | | | | | org/content/early/ |
| | | | | | | | | | 2020/06/15/science.abc7424) |
| | | | | | | mAb-119 | 4092 | YSTDSTAN | Anna Wee et al., 2020 |
| | | | | | | | | YKV | (https://science.sciencemag. |
| | | | | | | | | | org/content/early/ |
| | | | | | | | | | 2020/06/15/science.abc7424) |
| | | | | | | mAb-12 | 4093 | MQGTEW | Anna Wee et al., 2020 |
| | | | | | | | | PRT | (https://science.sciencemag. |
| | | | | | | | | | org/content/early/ |
| | | | | | | | | | 2020/06/15/science.abc7424) |
| | | | | | | mAb-120 | 4094 | CSYAGSSA | Anna Wee et al., 2020 |
| | | | | | | | | VVVV | (https://science.sciencemag. |
| | | | | | | | | | org/content/early/ |
| | | | | | | | | | 2020/06/15/science.abc7424) |
| | | | | | | mAb-121 | 4095 | QQYYSTPY | Anna Wee et al., 2020 |
| | | | | | | | | T | (https://science.sciencemag. |
| | | | | | | | | | org/content/early/ |
| | | | | | | | | | 2020/06/15/science.abc7424) |
| | | | | | | mAb-122 | 4096 | LQRSDWH | Anna Wee et al., 2020 |
| | | | | | | | | PIT | (https://science.sciencemag. |
| | | | | | | | | | org/content/early/ |
| | | | | | | | | | 2020/06/15/science.abc7424) |
| | | | | | | mAb-123 | 4097 | QQRSNWP | Anna Wee et al., 2020 |
| | | | | | | | | PRLT | (https://science.sciencemag. |
| | | | | | | | | | org/content/early/ |
| | | | | | | | | | 2020/06/15/science.abc7424) |
| | | | | | | mAb-124 | 4098 | LQYSLATT | Anna Wee et al., 2020 |
| | | | | | | | | | (https://science.sciencemag. |
| | | | | | | | | | org/content/early/ |
| | | | | | | | | | 2020/06/15/science.abc7424) |
| | | | | | | mAb-125 | 4099 | ETWDSNL | Anna Wee et al., 2020 |
| | | | | | | | | KGV | (https://science.sciencemag. |
| | | | | | | | | | org/content/early/ |
| | | | | | | | | | 2020/06/15/science.abc7424) |
| | | | | | | mAb-126 | 4100 | EAWDNNN | Anna Wee et al., 2020 |
| | | | | | | | | LGV | (https://science.sciencemag. |
| | | | | | | | | | org/content/early/ |
| | | | | | | | | | 2020/06/15/science.abc7424) |
| | | | | | | mAb-127 | 4101 | LQHNSYPL | Anna Wee et al., 2020 |
| | | | | | | | | T | (https://science.sciencemag. |
| | | | | | | | | | org/content/early/ |
| | | | | | | | | | 2020/06/15/science.abc7424) |
| | | | | | | mAb-128 | 4102 | MQALQTP | Anna Wee et al., 2020 |
| | | | | | | | | GVT | (https://science.sciencemag. |
| | | | | | | | | | org/content/early/ |
| | | | | | | | | | 2020/06/15/science.abc7424) |
| | | | | | | mAb-129 | 4103 | ATWDDSL | Anna Wee et al., 2020 |
| | | | | | | | | NGVV | (https://science.sciencemag. |
| | | | | | | | | | org/content/early/ |
| | | | | | | | | | 2020/06/15/science.abc7424) |
| | | | | | | mAb-13 | 4104 | MQGTDW | Anna Wee et al., 2020 |
| | | | | | | | | PRS | (https://science.sciencemag. |
| | | | | | | | | | org/content/early/ |
| | | | | | | | | | 2020/06/15/science.abc7424) |
| | | | | | | mAb-130 | 4105 | LHTYTTPRT | Anna Wee et al., 2020 |
| | | | | | | | | | (https://science.sciencemag. |
| | | | | | | | | | org/content/early/ |
| | | | | | | | | | 2020/06/15/science.abc7424) |
| | | | | | | mAb-131 | 4106 | QQYNYWP | Anna Wee et al., 2020 |
| | | | | | | | | PLT | (https://science.sciencemag. |
| | | | | | | | | | org/content/early/ |
| | | | | | | | | | 2020/06/15/science.abc7424) |
| | | | | | | mAb-132 | 4107 | QQSYRFPI | Anna Wee et al., 2020 |
| | | | | | | | | T | (https://science.sciencemag. |
| | | | | | | | | | org/content/early/ |
| | | | | | | | | | 2020/06/15/science.abc7424) |
| | | | | | | mAb-133 | 4108 | QQRTNWP | Anna Wee et al., 2020 |
| | | | | | | | | GAT | (https://science.sciencemag. |
| | | | | | | | | | org/content/early/ |
| | | | | | | | | | 2020/06/15/science.abc7424) |
| | | | | | | mAb-134 | 4109 | HTWGTDI | Anna Wee et al., 2020 |
| | | | | | | | | QV | (https://science. science |
| | | | | | | | | | mag.org/content/early/ |
| | | | | | | | | | 2020/06/15/science.abc |
| | | | | | | | | | 7424) |
| | | | | | | mAb-135 | 4110 | QSYDSSSQ | Anna Wee et al., 2020 |
| | | | | | | | | V | (https://science.sciencemag. |
| | | | | | | | | | org/content/early/ |
| | | | | | | | | | 2020/06/15/science.abc7424) |
| | | | | | | mAb-136 | 4111 | QQYNYWP | Anna Wee et al., 2020 |
| | | | | | | | | PLT | (https://science.sciencemag. |
| | | | | | | | | | org/content/early/ |
| | | | | | | | | | 2020/06/15/science.abc7424) |
| | | | | | | mAb-137 | 4112 | MQGTEW | Anna Wee et al., 2020 |
| | | | | | | | | PRT | (https://science.sciencemag. |
| | | | | | | | | | org/content/early/ |
| | | | | | | | | | 2020/06/15/science.abc7424) |
| | | | | | | mAb-138 | 4113 | QQYNSLYT | Anna Wee et al., 2020 |
| | | | | | | | | | (https://science.sciencemag. |
| | | | | | | | | | org/content/early/ |
| | | | | | | | | | 2020/06/15/science.abc7424) |
| | | | | | | mAb-139 | 4114 | QQYHHWP | Anna Wee et al., 2020 |
| | | | | | | | | PYT | (https://science.sciencemag. |
| | | | | | | | | | org/content/early/ |
| | | | | | | | | | 2020/06/15/science.abc7424) |
| | | | | | | mAb-14 | 4115 | QQYCSTPP | Anna Wee et al., 2020 |
| | | | | | | | | | (https://science.sciencemag. |
| | | | | | | | | | org/content/early/ |
| | | | | | | | | | 2020/06/15/science.abc7424) |
| | | | | | | mAb-140 | 4116 | MQGTEW | Anna Wee et al., 2020 |
| | | | | | | | | PRT | (https://science.sciencemag. |
| | | | | | | | | | org/content/early/ |
| | | | | | | | | | 2020/06/15/science.abc7424) |
| | | | | | | mAb-141 | 4117 | MQGTDW | Anna Wee et al., 2020 |
| | | | | | | | | PRS | (https://science.sciencemag. |
| | | | | | | | | | org/content/early/ |
| | | | | | | | | | 2020/06/15/science.abc7424) |
| | | | | | | mAb-142 | 4118 | QQSYSTPLI | Anna Wee et al., 2020 |
| | | | | | | | | T | (https://science.sciencemag. |
| | | | | | | | | | org/content/early/ |
| | | | | | | | | | 2020/06/15/science.abc7424) |
| | | | | | | mAb-143 | 4119 | MQGTEW | Anna Wee et al., 2020 |
| | | | | | | | | PRT | (https://science.sciencemag. |
| | | | | | | | | | org/content/early/ |
| | | | | | | | | | 2020/06/15/science.abc7424) |
| | | | | | | mAb-144 | 4120 | MQGTDW | Anna Wee et al., 2020 |
| | | | | | | | | PRT | (https://science. science |
| | | | | | | | | | mag.org/content/early/ |
| | | | | | | | | | 2020/06/15/science.abc |
| | | | | | | | | | 7424) |
| | | | | | | mAb-145 | 4121 | QQRFSWY | Anna Wee et al., 2020 |
| | | | | | | | | N | (https://science.sciencemag. |
| | | | | | | | | | org/content/early/ |
| | | | | | | | | | 2020/06/15/science.abc7424) |
| | | | | | | mAb-146 | 4122 | CSYGGRST | Anna Wee et al., 2020 |
| | | | | | | | | SVV | (https://science.sciencemag. |
| | | | | | | | | | org/content/early/ |
| | | | | | | | | | 2020/06/15/science.abc7424) |
| | | | | | | mAb-147 | 4123 | QQRFSWY | Anna Wee et al., 2020 |
| | | | | | | | | N | (https://science.sciencemag. |
| | | | | | | | | | org/content/early/ |
| | | | | | | | | | 2020/06/15/science.abc7424) |
| | | | | | | mAb-148 | 4124 | SSYTSGGTL | Anna Wee et al., 2020 |
| | | | | | | | | V | (https://science.sciencemag. |
| | | | | | | | | | org/content/early/ |
| | | | | | | | | | 2020/06/15/science.abc7424) |
| | | | | | | mAb-149 | 4125 | MQATEWP | Anna Wee et al., 2020 |
| | | | | | | | | RT | (https://science.sciencemag. |
| | | | | | | | | | org/content/early/ |
| | | | | | | | | | 2020/06/15/science.abc7424) |
| | | | | | | mAb-15 | 4126 | MQGTEW | Anna Wee et al., 2020 |
| | | | | | | | | PRT | (https://science.sciencemag. |
| | | | | | | | | | org/content/early/ |
| | | | | | | | | | 2020/06/15/science.abc7424) |
| | | | | | | mAb-150 | 4127 | MQGTEW | Anna Wee et al., 2020 |
| | | | | | | | | PRT | (https://science.sciencemag. |
| | | | | | | | | | org/content/early/ |
| | | | | | | | | | 2020/06/15/science.abc7424) |
| | | | | | | mAb-151 | 4128 | MQGTDW | Anna Wee et al., 2020 |
| | | | | | | | | PRT | (https://science.sciencemag. |
| | | | | | | | | | org/content/early/ |
| | | | | | | | | | 2020/06/15/science.abc7424) |
| | | | | | | mAb-152 | 4129 | MQGTEW | Anna Wee et al., 2020 |
| | | | | | | | | PRT | (https://science. science |
| | | | | | | | | | mag.org/content/early/ |
| | | | | | | | | | 2020/06/15/science.abc |
| | | | | | | | | | 7424) |
| | | | | | | mAb-153 | 4130 | MQATEWP | Anna Wee et al., 2020 |
| | | | | | | | | RT | (https://science.sciencemag. |
| | | | | | | | | | org/content/early/ |
| | | | | | | | | | 2020/06/15/science.abc7424) |
| | | | | | | mAb-154 | 4131 | QSADSNDS | Anna Wee et al., 2020 |
| | | | | | | | | SPV | (https://science.sciencemag. |
| | | | | | | | | | org/content/early/ |
| | | | | | | | | | 2020/06/15/science.abc7424) |
| | | | | | | mAb-155 | 4132 | HQRSNWP | Anna Wee et al., 2020 |
| | | | | | | | | | (https://science.sciencemag. |
| | | | | | | | | | org/content/early/ |
| | | | | | | | | | 2020/06/15/science.abc7424) |
| | | | | | | mAb-156 | 4133 | QQSYSIPW | Anna Wee et al., 2020 |
| | | | | | | | | T | (https://science.sciencemag. |
| | | | | | | | | | org/content/early/ |
| | | | | | | | | | 2020/06/15/science.abc7424) |
| | | | | | | mAb-157 | 4134 | QHSYSSPP | Anna Wee et al., 2020 |
| | | | | | | | | LT | (https://science.sciencemag. |
| | | | | | | | | | org/content/early/ |
| | | | | | | | | | 2020/06/15/science.abc7424) |
| | | | | | | mAb-158 | 4135 | MQGTDW | Anna Wee et al., 2020 |
| | | | | | | | | PRT | (https://science.sciencemag. |
| | | | | | | | | | org/content/early/ |
| | | | | | | | | | 2020/06/15/science.abc7424) |
| | | | | | | mAb-159 | 4136 | MQTTDWP | Anna Wee et al., 2020 |
| | | | | | | | | RT | (https://science.sciencemag. |
| | | | | | | | | | org/content/early/ |
| | | | | | | | | | 2020/06/15/science.abc7424) |
| | | | | | | mAb-16 | 4137 | MQGTEW | Anna Wee et al., 2020 |
| | | | | | | | | PRT | (https://science.sciencemag. |
| | | | | | | | | | org/content/early/ |
| | | | | | | | | | 2020/06/15/science.abc7424) |
| | | | | | | mAb-160 | 4138 | HQYSGSAT | Anna Wee et al., 2020 |
| | | | | | | | | | (https://science.sciencemag. |
| | | | | | | | | | org/content/early/ |
| | | | | | | | | | 2020/06/15/science.abc7424) |
| | | | | | | mAb-161 | 4139 | ATWDDILN | Anna Wee et al., 2020 |
| | | | | | | | | GPV | (https://science.sciencemag. |
| | | | | | | | | | org/content/early/ |
| | | | | | | | | | 2020/06/15/science.abc7424) |
| | | | | | | mAb-162 | 4140 | QKYNRAP | Anna Wee et al., 2020 |
| | | | | | | | | WT | (https://science.sciencemag. |
| | | | | | | | | | org/content/early/ |
| | | | | | | | | | 2020/06/15/science.abc7424) |
| | | | | | | mAb-163 | 4141 | SSYISDIKLV | Anna Wee et al., 2020 |
| | | | | | | | | V | (https://science.sciencemag. |
| | | | | | | | | | org/content/early/ |
| | | | | | | | | | 2020/06/15/science.abc7424) |
| | | | | | | mAb-164 | 4142 | CSYAGTYI | Anna Wee et al., 2020 |
| | | | | | | | | | (https://science.sciencemag. |
| | | | | | | | | | org/content/early/ |
| | | | | | | | | | 2020/06/15/science.abc7424) |
| | | | | | | mAb-165 | 4143 | CSYRSDNT | Anna Wee et al., 2020 |
| | | | | | | | | YI | (https://science.sciencemag. |
| | | | | | | | | | org/content/early/ |
| | | | | | | | | | 2020/06/15/science.abc7424) |
| | | | | | | mAb-166 | 4144 | MQGTEW | Anna Wee et al., 2020 |
| | | | | | | | | PRT | (https://science.sciencemag. |
| | | | | | | | | | org/content/early/ |
| | | | | | | | | | 2020/06/15/science.abc7424) |
| | | | | | | mAb-167 | 4145 | AAWDDSL | Anna Wee et al., 2020 |
| | | | | | | | | NTFRYV | (https://science.sciencemag. |
| | | | | | | | | | org/content/early/ |
| | | | | | | | | | 2020/06/15/science.abc7424) |
| | | | | | | mAb-168 | 4146 | QQSYNTFF | Anna Wee et al., 2020 |
| | | | | | | | | T | (https://science.sciencemag. |
| | | | | | | | | | org/content/early/ |
| | | | | | | | | | 2020/06/15/science.abc7424) |
| | | | | | | mAb-169 | 4147 | QHYDSYPT | Anna Wee et al., 2020 |
| | | | | | | | | | (https://science.sciencemag. |
| | | | | | | | | | org/content/early/ |
| | | | | | | | | | 2020/06/15/science.abc7424) |
| | | | | | | mAb-17 | 4148 | MQGTEWL | Anna Wee et al., 2020 |
| | | | | | | | | GT | (https://science.sciencemag. |
| | | | | | | | | | org/content/early/ |
| | | | | | | | | | 2020/06/15/science.abc7424) |
| | | | | | | mAb-170 | 4149 | MQGTEW | Anna Wee et al., 2020 |
| | | | | | | | | PRT | (https://science.sciencemag. |
| | | | | | | | | | org/content/early/ |
| | | | | | | | | | 2020/06/15/science.abc7424) |
| | | | | | | mAb-171 | 4150 | MQTTDWP | Anna Wee et al., 2020 |
| | | | | | | | | RT | (https://science.sciencemag. |
| | | | | | | | | | org/content/early/ |
| | | | | | | | | | 2020/06/15/science.abc7424) |
| | | | | | | mAb-172 | 4151 | QQSYSTPP | Anna Wee et al., 2020 |
| | | | | | | | | T | (https://science.sciencemag. |
| | | | | | | | | | org/content/early/ |
| | | | | | | | | | 2020/06/15/science.abc7424) |
| | | | | | | mAb-173 | 4152 | HQYNKWP | Anna Wee et al., 2020 |
| | | | | | | | | PIT | (https://science.sciencemag. |
| | | | | | | | | | org/content/early/ |
| | | | | | | | | | 2020/06/15/science.abc7424) |
| | | | | | | mAb-174 | 4153 | KQYNSYPY | Anna Wee et al., 2020 |
| | | | | | | | | T | (https://science.sciencemag. |
| | | | | | | | | | org/content/early/ |
| | | | | | | | | | 2020/06/15/science.abc7424) |
| | | | | | | mAb-175 | 4154 | QQSYSDS | Anna Wee et al., 2020 |
| | | | | | | | | WT | (https://science.sciencemag. |
| | | | | | | | | | org/content/early/ |
| | | | | | | | | | 2020/06/15/science.abc7424) |
| | | | | | | mAb-176 | 4155 | MQGTEW | Anna Wee et al., 2020 |
| | | | | | | | | PRT | (https://science.sciencemag. |
| | | | | | | | | | org/content/early/ |
| | | | | | | | | | 2020/06/15/science.abc7424) |
| | | | | | | mAb-177 | 4156 | MQGTDW | Anna Wee et al., 2020 |
| | | | | | | | | PRT | (https://science.sciencemag. |
| | | | | | | | | | org/content/early/ |
| | | | | | | | | | 2020/06/15/science.abc7424) |
| | | | | | | mAb-178 | 4157 | QQYYTTPY | Anna Wee et al., 2020 |
| | | | | | | | | T | (https://science.sciencemag. |
| | | | | | | | | | org/content/early/ |
| | | | | | | | | | 2020/06/15/science.abc7424) |
| | | | | | | mAb-179 | 4158 | QQTYSTPP | Anna Wee et al., 2020 |
| | | | | | | | | EGPT | (https://science.sciencemag. |
| | | | | | | | | | org/content/early/ |
| | | | | | | | | | 2020/06/15/science.abc7424) |
| | | | | | | mAb-18 | 4159 | CSYAGASP | Anna Wee et al., 2020 |
| | | | | | | | | FVV | (https://science.sciencemag. |
| | | | | | | | | | org/content/early/ |
| | | | | | | | | | 2020/06/15/science.abc7424) |
| | | | | | | mAb-180 | 4160 | QQYGSSYT | Anna Wee et al., 2020 |
| | | | | | | | | | (https://science.sciencemag. |
| | | | | | | | | | org/content/early/ |
| | | | | | | | | | 2020/06/15/science.abc7424) |
| | | | | | | mAb-181 | 4161 | MQATEWP | Anna Wee et al., 2020 |
| | | | | | | | | RT | (https://science.sciencemag. |
| | | | | | | | | | org/content/early/ |
| | | | | | | | | | 2020/06/15/science.abc7424) |
| | | | | | | mAb-182 | 4162 | MQTTDWP | Anna Wee et al., 2020 |
| | | | | | | | | RT | (https://science.sciencemag. |
| | | | | | | | | | org/content/early/ |
| | | | | | | | | | 2020/06/15/science.abc7424) |
| | | | | | | mAb-183 | 4163 | MQGTDW | Anna Wee et al., 2020 |
| | | | | | | | | PRT | (https://science.sciencemag. |
| | | | | | | | | | org/content/early/ |
| | | | | | | | | | 2020/06/15/science.abc7424) |
| | | | | | | mAb-184 | 4164 | MQGTEW | Anna Wee et al., 2020 |
| | | | | | | | | PRT | (https://science.sciencemag. |
| | | | | | | | | | org/content/early/ |
| | | | | | | | | | 2020/06/15/science.abc7424) |
| | | | | | | mAb-185 | 4165 | CSYAGDDT | Anna Wee et al., 2020 |
| | | | | | | | | W | (https://science.sciencemag. |
| | | | | | | | | | org/content/early/ |
| | | | | | | | | | 2020/06/15/science.abc7424) |
| | | | | | | mAb-186 | 4166 | HQYGGSPT | Anna Wee et al., 2020 |
| | | | | | | | | T | (https://science.sciencemag. |
| | | | | | | | | | org/content/early/ |
| | | | | | | | | | 2020/06/15/science.abc7424) |
| | | | | | | mAb-187 | 4167 | MQGTDW | Anna Wee et al., 2020 |
| | | | | | | | | PRT | (https://science.sciencemag. |
| | | | | | | | | | org/content/early/ |
| | | | | | | | | | 2020/06/15/science.abc7424) |
| | | | | | | mAb-188 | 4168 | QQRTSTLT | Anna Wee et al., 2020 |
| | | | | | | | | | (https://science.sciencemag. |
| | | | | | | | | | org/content/early/ |
| | | | | | | | | | 2020/06/15/science.abc7424) |
| | | | | | | mAb-189 | 4169 | MQGTEW | Anna Wee et al., 2020 |
| | | | | | | | | PRT | (https://science.sciencemag. |
| | | | | | | | | | org/content/early/ |
| | | | | | | | | | 2020/06/15/science.abc7424) |
| | | | | | | mAb-19 | 4170 | ETWDSSLS | Anna Wee et al., 2020 |
| | | | | | | | | VW | (https://science.sciencemag. |
| | | | | | | | | | org/content/early/ |
| | | | | | | | | | 2020/06/15/science.abc7424) |
| | | | | | | mAb-190 | 4171 | GTWDSRLS | Anna Wee et al., 2020 |
| | | | | | | | | AW | (https://science.sciencemag. |
| | | | | | | | | | org/content/early/ |
| | | | | | | | | | 2020/06/15/science.abc7424) |
| | | | | | | mAb-191 | 4172 | QQRSNWP | Anna Wee et al., 2020 |
| | | | | | | | | QN | (https://science.sciencemag. |
| | | | | | | | | | org/content/early/ |
| | | | | | | | | | 2020/06/15/science.abc7424) |
| | | | | | | mAb-192 | 4173 | QQYDSYPV | Anna Wee et al., 2020 |
| | | | | | | | | T | (https://science.sciencemag. |
| | | | | | | | | | org/content/early/ |
| | | | | | | | | | 2020/06/15/science.abc7424) |
| | | | | | | mAb-193 | 4174 | QQYYTMW | Anna Wee et al., 2020 |
| | | | | | | | | T | (https://science.sciencemag. |
| | | | | | | | | | org/content/early/ |
| | | | | | | | | | 2020/06/15/science.abc7424) |
| | | | | | | mAb-194 | 4175 | GTWDSSLS | Anna Wee et al., 2020 |
| | | | | | | | | VDNYV | (https://science.sciencemag. |
| | | | | | | | | | org/content/early/ |
| | | | | | | | | | 2020/06/15/science.abc7424) |
| | | | | | | mAb-195 | 4176 | MQGTDW | Anna Wee et al., 2020 |
| | | | | | | | | PRT | (https://science.sciencemag. |
| | | | | | | | | | org/content/early/ |
| | | | | | | | | | 2020/06/15/science.abc7424) |
| | | | | | | mAb-196 | 4177 | MQGTEW | Anna Wee et al., 2020 |
| | | | | | | | | PRT | (https://science.sciencemag. |
| | | | | | | | | | org/content/early/ |
| | | | | | | | | | 2020/06/15/science.abc7424) |
| | | | | | | mAb-197 | 4178 | QQSYSTPL | Anna Wee et al., 2020 |
| | | | | | | | | T | (https://science.sciencemag. |
| | | | | | | | | | org/content/early/ |
| | | | | | | | | | 2020/06/15/science.abc7424) |
| | | | | | | mAb-2 | 4179 | QQRSNWP | Anna Wee et al., 2020 |
| | | | | | | | | QN | (https://science.sciencemag. |
| | | | | | | | | | org/content/early/ |
| | | | | | | | | | 2020/06/15/science.abc7424) |
| | | | | | | mAb-20 | 4180 | QSYDSSLS | Anna Wee et al., 2020 |
| | | | | | | | | AS | (https://science.sciencemag. |
| | | | | | | | | | org/content/early/ |
| | | | | | | | | | 2020/06/15/science.abc7424) |
| | | | | | | mAb-21 | 4181 | QSYDSSLS | Anna Wee et al., 2020 |
| | | | | | | | | GVL | (https://science.sciencemag. |
| | | | | | | | | | org/content/early/ |
| | | | | | | | | | 2020/06/15/science.abc7424) |
| | | | | | | mAb-22 | 4182 | MQGTEW | Anna Wee et al., 2020 |
| | | | | | | | | PRT | (https://science.sciencemag. |
| | | | | | | | | | org/content/early/ |
| | | | | | | | | | 2020/06/15/science.abc7424) |
| | | | | | | mAb-23 | 4183 | QQYNTWP | Anna Wee et al., 2020 |
| | | | | | | | | PLT | (https://science.sciencemag. |
| | | | | | | | | | org/content/early/ |
| | | | | | | | | | 2020/06/15/science.abc7424) |
| | | | | | | mAb-24 | 4184 | MQGTHW | Anna Wee et al., 2020 |
| | | | | | | | | PRS | (https://science.sciencemag. |
| | | | | | | | | | org/content/early/ |
| | | | | | | | | | 2020/06/15/science.abc7424) |
| | | | | | | mAb-25 | 4185 | QQYGSAPL | Anna Wee et al., 2020 |
| | | | | | | | | | (https://science.sciencemag. |
| | | | | | | | | | org/content/early/ |
| | | | | | | | | | 2020/06/15/science.abc7424) |
| | | | | | | mAb-26 | 4186 | QQYGNSP | Anna Wee et al., 2020 |
| | | | | | | | | RT | (https://science.sciencemag. |
| | | | | | | | | | org/content/early/ |
| | | | | | | | | | 2020/06/15/science.abc7424) |
| | | | | | | mAb-27 | 4187 | ETWDTSLS | Anna Wee et al., 2020 |
| | | | | | | | | VW | (https://science.sciencemag. |
| | | | | | | | | | org/content/early/ |
| | | | | | | | | | 2020/06/15/science.abc7424) |
| | | | | | | mAb-28 | 4188 | MQGTDW | Anna Wee et al., 2020 |
| | | | | | | | | PRT | (https://science.sciencemag. |
| | | | | | | | | | org/content/early/ |
| | | | | | | | | | 2020/06/15/science.abc7424) |
| | | | | | | mAb-29 | 4189 | LQYSDATT | Anna Wee et al., 2020 |
| | | | | | | | | | (https://science.sciencemag. |
| | | | | | | | | | org/content/early/ |
| | | | | | | | | | 2020/06/15/science.abc7424) |
| | | | | | | mAb-3 | 4190 | QQSYTTPIT | Anna Wee et al., 2020 |
| | | | | | | | | | (https://science.sciencemag. |
| | | | | | | | | | org/content/early/ |
| | | | | | | | | | 2020/06/15/science.abc7424) |
| | | | | | | mAb-30 | 4191 | MQATEWP | Anna Wee et al., 2020 |
| | | | | | | | | RT | (https://science.sciencemag. |
| | | | | | | | | | org/content/early/ |
| | | | | | | | | | 2020/06/15/science.abc7424) |
| | | | | | | mAb-31 | 4192 | QQRRNWP | Anna Wee et al., 2020 |
| | | | | | | | | PMYT | (https://science.sciencemag. |
| | | | | | | | | | org/content/early/ |
| | | | | | | | | | 2020/06/15/science.abc7424) |
| | | | | | | mAb-32 | 4193 | MQTTDWP | Anna Wee et al., 2020 |
| | | | | | | | | RT | (https://science.sciencemag. |
| | | | | | | | | | org/content/early/ |
| | | | | | | | | | 2020/06/15/science.abc7424) |
| | | | | | | mAb-33 | 4194 | MQTTDWP | Anna Wee et al., 2020 |
| | | | | | | | | RT | (https://science.sciencemag. |
| | | | | | | | | | org/content/early/ |
| | | | | | | | | | 2020/06/15/science.abc7424) |
| | | | | | | mAb-34 | 4195 | QSYDSGNL | Anna Wee et al., 2020 |
| | | | | | | | | W | (https://science.sciencemag. |
| | | | | | | | | | org/content/early/ |
| | | | | | | | | | 2020/06/15/science.abc7424) |
| | | | | | | mAb-35 | 4196 | MQGTEW | Anna Wee et al., 2020 |
| | | | | | | | | PRT | (https://science.sciencemag. |
| | | | | | | | | | org/content/early/ |
| | | | | | | | | | 2020/06/15/science.abc7424) |
| | | | | | | mAb-36 | 4197 | MQGTDW | Anna Wee et al., 2020 |
| | | | | | | | | PRT | (https://science.sciencemag. |
| | | | | | | | | | org/content/early/ |
| | | | | | | | | | 2020/06/15/science.abc7424) |
| | | | | | | mAb-37 | 4198 | QQYGTSPV | Anna Wee et al., 2020 |
| | | | | | | | | | (https://science.sciencemag. |
| | | | | | | | | | org/content/early/ |
| | | | | | | | | | 2020/06/15/science.abc7424) |
| | | | | | | mAb-38 | 4199 | MQGTDW | Anna Wee et al., 2020 |
| | | | | | | | | PRT | (https://science.sciencemag. |
| | | | | | | | | | org/content/early/ |
| | | | | | | | | | 2020/06/15/science.abc7424) |
| | | | | | | mAb-39 | 4200 | QQRRNWP | Anna Wee et al., 2020 |
| | | | | | | | | PMYT | (https://science.sciencemag. |
| | | | | | | | | | org/content/early/ |
| | | | | | | | | | 2020/06/15/science.abc7424) |
| | | | | | | mAb-4 | 4201 | QSYDSSLS | Anna Wee et al., 2020 |
| | | | | | | | | VLYV | (https://science.sciencemag. |
| | | | | | | | | | org/content/early/ |
| | | | | | | | | | 2020/06/15/science.abc7424) |
| | | | | | | mAb-40 | 4202 | QHRTNWP | Anna Wee et al., 2020 |
| | | | | | | | | | (https://science.sciencemag. |
| | | | | | | | | | org/content/early/ |
| | | | | | | | | | 2020/06/15/science.abc7424) |
| | | | | | | mAb-41 | 4203 | FLSYRGAP | Anna Wee et al., 2020 |
| | | | | | | | | PV | (https://science.sciencemag. |
| | | | | | | | | | org/content/early/ |
| | | | | | | | | | 2020/06/15/science.abc7424) |
| | | | | | | mAb-42 | 4204 | QKHDRDP | Anna Wee et al., 2020 |
| | | | | | | | | WT | (https://science.sciencemag. |
| | | | | | | | | | org/content/early/ |
| | | | | | | | | | 2020/06/15/science.abc7424) |
| | | | | | | mAb-43 | 4205 | MQGTEW | Anna Wee et al., 2020 |
| | | | | | | | | PRT | (https://science.sciencemag. |
| | | | | | | | | | org/content/early/ |
| | | | | | | | | | 2020/06/15/science.abc7424) |
| | | | | | | mAb-44 | 4206 | QQAESFPF | Anna Wee et al., 2020 |
| | | | | | | | | T | (https://science.sciencemag. |
| | | | | | | | | | org/content/early/ |
| | | | | | | | | | 2020/06/15/science.abc7424) |
| | | | | | | mAb-45 | 4207 | MQATDW | Anna Wee et al., 2020 |
| | | | | | | | | PRT | (https://science.sciencemag. |
| | | | | | | | | | org/content/early/ |
| | | | | | | | | | 2020/06/15/science.abc7424) |
| | | | | | | mAb-46 | 4208 | QQRGNGY | Anna Wee et al., 2020 |
| | | | | | | | | T | (https://science.sciencemag. |
| | | | | | | | | | org/content/early/ |
| | | | | | | | | | 2020/06/15/science.abc7424) |
| | | | | | | mAb-47 | 4209 | MQATEWP | Anna Wee et al., 2020 |
| | | | | | | | | RT | (https://science.sciencemag. |
| | | | | | | | | | org/content/early/ |
| | | | | | | | | | 2020/06/15/science.abc7424) |
| | | | | | | mAb-48 | 4210 | MQGTDW | Anna Wee et al., 2020 |
| | | | | | | | | PRT | (https://science.sciencemag. |
| | | | | | | | | | org/content/early/ |
| | | | | | | | | | 2020/06/15/science.abc7424) |
| | | | | | | mAb-49 | 4211 | MQATDW | Anna Wee et al., 2020 |
| | | | | | | | | PRT | (https://science.sciencemag. |
| | | | | | | | | | org/content/early/ |
| | | | | | | | | | 2020/06/15/science.abc7424) |
| | | | | | | mAb-5 | 4212 | QQSYSVPL | Anna Wee et al., 2020 |
| | | | | | | | | T | (https://science.sciencemag. |
| | | | | | | | | | org/content/early/ |
| | | | | | | | | | 2020/06/15/science.abc7424) |
| | | | | | | mAb-50 | 4213 | MQATDW | Anna Wee et al., 2020 |
| | | | | | | | | PRT | (https://science.sciencemag. |
| | | | | | | | | | org/content/early/ |
| | | | | | | | | | 2020/06/15/science.abc7424) |
| | | | | | | mAb-51 | 4214 | STYTSTSTI | Anna Wee et al., 2020 |
| | | | | | | | | | (https://science.sciencemag. |
| | | | | | | | | | org/content/early/ |
| | | | | | | | | | 2020/06/15/science.abc7424) |
| | | | | | | mAb-52 | 4215 | MQGTDW | Anna Wee et al., 2020 |
| | | | | | | | | PRT | (https://science.sciencemag. |
| | | | | | | | | | org/content/early/ |
| | | | | | | | | | 2020/06/15/science.abc7424) |
| | | | | | | mAb-53 | 4216 | MQATDW | Anna Wee et al., 2020 |
| | | | | | | | | PRT | (https://science.sciencemag. |
| | | | | | | | | | org/content/early/ |
| | | | | | | | | | 2020/06/15/science.abc7424) |
| | | | | | | mAb-54 | 4217 | QQTYITPG | Anna Wee et al., 2020 |
| | | | | | | | | T | (https://science.sciencemag. |
| | | | | | | | | | org/content/early/ |
| | | | | | | | | | 2020/06/15/science.abc7424) |
| | | | | | | mAb-55 | 4218 | QQYYLTP | Anna Wee et al., 2020 |
| | | | | | | | | WT | (https://science.sciencemag. |
| | | | | | | | | | org/content/early/ |
| | | | | | | | | | 2020/06/15/science.abc7424) |
| | | | | | | mAb-56 | 4219 | CSYAVSGT | Anna Wee et al., 2020 |
| | | | | | | | | VL | (https://science.sciencemag. |
| | | | | | | | | | org/content/early/ |
| | | | | | | | | | 2020/06/15/science.abc7424) |
| | | | | | | mAb-57 | 4220 | LQYSLATT | Anna Wee et al., 2020 |
| | | | | | | | | | (https://science.sciencemag. |
| | | | | | | | | | org/content/early/ |
| | | | | | | | | | 2020/06/15/science.abc7424) |
| | | | | | | mAb-58 | 4221 | QQRSDGY | Anna Wee et al., 2020 |
| | | | | | | | | N | (https://science.sciencemag. |
| | | | | | | | | | org/content/early/ |
| | | | | | | | | | 2020/06/15/science.abc7424) |
| | | | | | | mAb-59 | 4222 | QQTYITPT | Anna Wee et al., 2020 |
| | | | | | | | | WT | (https://science.sciencemag. |
| | | | | | | | | | org/content/early/ |
| | | | | | | | | | 2020/06/15/science.abc7424) |
| | | | | | | mAb-6 | 4223 | QQSYSTPY | Anna Wee et al., 2020 |
| | | | | | | | | N | (https://science.sciencemag. |
| | | | | | | | | | org/content/early/ |
| | | | | | | | | | 2020/06/15/science.abc7424) |
| | | | | | | mAb-60 | 4224 | QQYNSOY | Anna Wee et al., 2020 |
| | | | | | | | | T | (https://science.sciencemag. |
| | | | | | | | | | org/content/early/ |
| | | | | | | | | | 2020/06/15/science.abc7424) |
| | | | | | | mAb-61 | 4225 | CSSPGTIT | Anna Wee et al., 2020 |
| | | | | | | | | WV | (https://science.sciencemag. |
| | | | | | | | | | org/content/early/ |
| | | | | | | | | | 2020/06/15/science.abc7424) |
| | | | | | | mAb-62 | 4226 | ATWDDILN | Anna Wee et al., 2020 |
| | | | | | | | | GPV | (https://science.sciencemag. |
| | | | | | | | | | org/content/early/ |
| | | | | | | | | | 2020/06/15/science.abc7424) |
| | | | | | | mAb-63 | 4227 | MOATHW | Anna Wee et al., 2020 |
| | | | | | | | | PRA | (https://science.sciencemag. |
| | | | | | | | | | org/content/early/ |
| | | | | | | | | | 2020/06/15/science.abc7424) |
| | | | | | | mAb-64 | 4228 | HQYGSSP | Anna Wee et al., 2020 |
| | | | | | | | | WT | (https://science.sciencemag. |
| | | | | | | | | | org/content/early/ |
| | | | | | | | | | 2020/06/15/science.abc7424) |
| | | | | | | mAb-65 | 4229 | QHRSNWP | Anna Wee et al., 2020 |
| | | | | | | | | PRYT | (https://science.sciencemag. |
| | | | | | | | | | org/content/early/ |
| | | | | | | | | | 2020/06/15/science.abc7424) |
| | | | | | | mAb-66 | 4230 | YSTDSTAN | Anna Wee et al., 2020 |
| | | | | | | | | YKV | (https://science.sciencemag. |
| | | | | | | | | | org/content/early/ |
| | | | | | | | | | 2020/06/15/science.abc7424) |
| | | | | | | mAb-67 | 4231 | YSTDSTAN | Anna Wee et al., 2020 |
| | | | | | | | | YKV | (https://science. science |
| | | | | | | | | | mag.org/content/early/ |
| | | | | | | | | | 2020/06/15/science.abc |
| | | | | | | | | | 7424) |
| | | | | | | mAb-68 | 4232 | YSTDSTAN | Anna Wee et al., 2020 |
| | | | | | | | | YKV | (https://science.sciencemag. |
| | | | | | | | | | org/content/early/ |
| | | | | | | | | | 2020/06/15/science.abc7424) |
| | | | | | | mAb-69 | 4233 | MIWHDNA | Anna Wee et al., 2020 |
| | | | | | | | | W | (https://science.sciencemag. |
| | | | | | | | | | org/content/early/ |
| | | | | | | | | | 2020/06/15/science.abc7424) |
| | | | | | | mAb-7 | 4234 | HQYNTWP | Anna Wee et al., 2020 |
| | | | | | | | | PLT | (https://science.sciencemag. |
| | | | | | | | | | org/content/early/ |
| | | | | | | | | | 2020/06/15/science.abc7424) |
| | | | | | | mAb-70 | 4235 | MQATHW | Anna Wee et al., 2020 |
| | | | | | | | | PRA | (https://science.sciencemag. |
| | | | | | | | | | org/content/early/ |
| | | | | | | | | | 2020/06/15/science.abc7424) |
| | | | | | | mAb-71 | 4236 | MQSIQVPI | Anna Wee et al., 2020 |
| | | | | | | | | T | (https://science.sciencemag. |
| | | | | | | | | | org/content/early/ |
| | | | | | | | | | 2020/06/15/science.abc7424) |
| | | | | | | mAb-72 | 4237 | QQYNLWP | Anna Wee et al., 2020 |
| | | | | | | | | | (https://science.sciencemag. |
| | | | | | | | | | org/content/early/ |
| | | | | | | | | | 2020/06/15/science.abc7424) |
| | | | | | | mAb-73 | 4238 | KQYNSYPY | Anna Wee et al., 2020 |
| | | | | | | | | T | (https://science.sciencemag. |
| | | | | | | | | | org/content/early/ |
| | | | | | | | | | 2020/06/15/science.abc7424) |
| | | | | | | mAb-74 | 4239 | ETWDDSLS | Anna Wee et al., 2020 |
| | | | | | | | | AW | (https://science.sciencemag. |
| | | | | | | | | | org/content/early/ |
| | | | | | | | | | 2020/06/15/science.abc7424) |
| | | | | | | mAb-75 | 4240 | MQSIQTPI | Anna Wee et al., 2020 |
| | | | | | | | | T | (https://science.sciencemag. |
| | | | | | | | | | org/content/early/ |
| | | | | | | | | | 2020/06/15/science.abc7424) |
| | | | | | | mAb-76 | 4241 | QQYYSTPP | Anna Wee et al., 2020 |
| | | | | | | | | T | (https://science.sciencemag. |
| | | | | | | | | | org/content/early/ |
| | | | | | | | | | 2020/06/15/science.abc7424) |
| | | | | | | mAb-77 | 4242 | MQATEWP | Anna Wee et al., 2020 |
| | | | | | | | | RT | (https://science.sciencemag. |
| | | | | | | | | | org/content/early/ |
| | | | | | | | | | 2020/06/15/science.abc7424) |
| | | | | | | mAb-78 | 4243 | QQYYTTPL | Anna Wee et al., 2020 |
| | | | | | | | | | (https://science.sciencemag. |
| | | | | | | | | | org/content/early/ |
| | | | | | | | | | 2020/06/15/science.abc7424) |
| | | | | | | mAb-79 | 4244 | MQGTDW | Anna Wee et al., 2020 |
| | | | | | | | | PRT | (https://science.sciencemag. |
| | | | | | | | | | org/content/early/ |
| | | | | | | | | | 2020/06/15/science.abc7424) |
| | | | | | | mAb-8 | 4245 | MQGTEW | Anna Wee et al., 2020 |
| | | | | | | | | PRT | (https://science.sciencemag. |
| | | | | | | | | | org/content/early/ |
| | | | | | | | | | 2020/06/15/science.abc7424) |
| | | | | | | | | | 7424) |
| | | | | | | mAb-80 | 4246 | MQGTEW | Anna Wee et al., 2020 |
| | | | | | | | | PRT | (https://science.sciencemag. |
| | | | | | | | | | org/content/early/ |
| | | | | | | | | | 2020/06/15/science.abc7424) |
| | | | | | | mAb-81 | 4247 | MQGTDW | Anna Wee et al., 2020 |
| | | | | | | | | PRT | (https://science.sciencemag. |
| | | | | | | | | | org/content/early/ |
| | | | | | | | | | 2020/06/15/science.abc7424) |
| | | | | | | mAb-82 | 4248 | SSYTSSSTL | Anna Wee et al., 2020 |
| | | | | | | | | YV | (https://science.sciencemag. |
| | | | | | | | | | org/content/early/ |
| | | | | | | | | | 2020/06/15/science.abc7424) |
| | | | | | | mAb-83 | 4249 | QQYNSGW | Anna Wee et al., 2020 |
| | | | | | | | | T | (https://science.sciencemag. |
| | | | | | | | | | org/content/early/ |
| | | | | | | | | | 2020/06/15/science.abc7424) |
| | | | | | | mAb-84 | 4250 | MQGTDW | Anna Wee et al., 2020 |
| | | | | | | | | PRT | (https://science.sciencemag. |
| | | | | | | | | | org/content/early/ |
| | | | | | | | | | 2020/06/15/science.abc7424) |
| | | | | | | mAb-85 | 4251 | LQLHNYSS | Anna Wee et al., 2020 |
| | | | | | | | | | (https://science.sciencemag. |
| | | | | | | | | | org/content/early/ |
| | | | | | | | | | 2020/06/15/science.abc7424) |
| | | | | | | mAb-86 | 4252 | QQRSDGY | Anna Wee et al., 2020 |
| | | | | | | | | N | (https://science.sciencemag. |
| | | | | | | | | | org/content/early/ |
| | | | | | | | | | 2020/06/15/science.abc7424) |
| | | | | | | mAb-87 | 4253 | SSYTSTNTV | Anna Wee et al., 2020 |
| | | | | | | | | | (https://science.sciencemag. |
| | | | | | | | | | org/content/early/ |
| | | | | | | | | | 2020/06/15/science.abc7424) |
| | | | | | | mAb-88 | 4254 | MQGTDW | Anna Wee et al., 2020 |
| | | | | | | | | PRT | (https://science.sciencemag. |
| | | | | | | | | | org/content/early/ |
| | | | | | | | | | 2020/06/15/science.abc7424) |
| | | | | | | mAb-89 | 4255 | CSSPGTIT | Anna Wee et al., 2020 |
| | | | | | | | | | (https://science.sciencemag. |
| | | | | | | | | | org/content/early/ |
| | | | | | | | | | 2020/06/15/science.abc7424) |
| | | | | | | mAb-9 | 4256 | QQCYSYPP | Anna Wee et al., 2020 |
| | | | | | | | | T | (https://science.sciencemag. |
| | | | | | | | | | org/content/early/ |
| | | | | | | | | | 2020/06/15/science.abc7424) |
| | | | | | | mAb-90 | 4257 | QQYYSTPY | Anna Wee et al., 2020 |
| | | | | | | | | T | (https://science.sciencemag. |
| | | | | | | | | | org/content/early/ |
| | | | | | | | | | 2020/06/15/science.abc7424) |
| | | | | | | mAb-91 | 4258 | CSYTRTNT | Anna Wee et al., 2020 |
| | | | | | | | | PVL | (https://science. science |
| | | | | | | | | | mag.org/content/early/ |
| | | | | | | | | | 2020/06/15/science.abc |
| | | | | | | | | | 7424) |
| | | | | | | mAb-92 | 4259 | QQYYSWP | Anna Wee et al., 2020 |
| | | | | | | | | PLT | (https://science.sciencemag. |
| | | | | | | | | | org/content/early/ |
| | | | | | | | | | 2020/06/15/science.abc7424) |
| | | | | | | mAb-93 | 4260 | MQGTDW | Anna Wee et al., 2020 |
| | | | | | | | | PRT | (https://science.sciencemag. |
| | | | | | | | | | org/content/early/ |
| | | | | | | | | | 2020/06/15/science.abc7424) |
| | | | | | | mAb-94 | 4261 | MQSTDWP | Anna Wee et al., 2020 |
| | | | | | | | | RT | (https://science.sciencemag. |
| | | | | | | | | | org/content/early/ |
| | | | | | | | | | 2020/06/15/science.abc7424) |
| | | | | | | mAb-95 | 4262 | MQGTEW | Anna Wee et al., 2020 |
| | | | | | | | | PRT | (https://science.sciencemag. |
| | | | | | | | | | org/content/early/ |
| | | | | | | | | | 2020/06/15/science.abc7424) |
| | | | | | | mAb-96 | 4263 | QQYNNWP | Anna Wee et al., 2020 |
| | | | | | | | | SLT | (https://science.sciencemag. |
| | | | | | | | | | org/content/early/ |
| | | | | | | | | | 2020/06/15/science.abc7424) |
| | | | | | | mAb-97 | 4264 | MQATEWP | Anna Wee et al., 2020 |
| | | | | | | | | RT | (https://science.science |
| | | | | | | | | | mag.org/content/early/ |
| | | | | | | | | | 2020/06/15/science.abc7424) |
| | | | | | | mAb-98 | 4265 | QQRSDGY | Anna Wee et al., 2020 |
| | | | | | | | | N | (https://science.sciencemag. |
| | | | | | | | | | org/content/early/ |
| | | | | | | | | | 2020/06/15/science.abc7424) |
| | | | | | | mAb-99 | 4266 | YSTDSTAN | Anna Wee et al., 2020 |
| | | | | | | | | YKV | (https://science.sciencemag. |
| | | | | | | | | | org/content/early/ |
| | | | | | | | | | 2020/06/15/science.abc7424) |
| | | | | | | mBG17 | 4267 | QQFYNYPR | James Terry et al., 2020 |
| | | | | | | | | T | (https://www.biorxiv.org/ |
| | | | | | | | | | content/10.1101/ |
| | | | | | | | | | 2020.09.03.280370v1.full) |
| | | | | | | mBG21 | 4268 | QQDYSSP | James Terry et al., 2020 |
| | | | | | | | | | (https://www.biorxiv.org/ |
| | | | | | | | | | content/10.1101/ |
| | | | | | | | | | 2020.09.03.280370v1.full) |
| | | | | | | mBG22 | 4269 | QQDYSSP | James Terry et al., 2020 |
| | | | | | | | | | (https://www.biorxiv.org/ |
| | | | | | | | | | content/10.1101/ |
| | | | | | | | | | 2020.09.03.280370v1.full) |
| | | | | | | mBG57 | 4270 | MQHLENP | James Terry et al., 2020 |
| | | | | | | | | LGVR | (https://www.biorxiv.org/ |
| | | | | | | | | | content/10.1101/ |
| | | | | | | | | | 2020.09.03.280370v1.full) |
| | | | | | | mBG67 | 4271 | LQYHRSP | James Terry et al., 2020 |
| | | | | | | | | | (https://www.biorxiv.org/ |
| | | | | | | | | | content/10.1101/ |
| | | | | | | | | | 2020.09.03.280370v1.full) |
| | | | | | | MD17 | 4272 | QQSYTTPL | Tal Noy-Porat et al., |
| | | | | | | | | T | 2020 |
| | | | | | | | | | (https://www.biorxiv.org/ |
| | | | | | | | | | content/10.1101/ |
| | | | | | | | | | 2020.05.20.106609v2) |
| | | | | | | MD29 | 4273 | HQTYTSPY | Tal Noy-Porat et al., |
| | | | | | | | | T | 2020 |
| | | | | | | | | | (https://www.biorxiv.org/ |
| | | | | | | | | | content/10.1101/ |
| | | | | | | | | | 2020.05.20.106609v2) |
| | | | | | | MD45 | 4274 | QQYGVSPE | Tal Noy-Porat et al., |
| | | | | | | | | II | 2020 |
| | | | | | | | | | (https://www.biorxiv.org/ |
| | | | | | | | | | content/10.1101/ |
| | | | | | | | | | 2020.05.20.106609v2) |
| | | | | | | MD47 | 4275 | QVWDSSS | Tal Noy-Porat et al., |
| | | | | | | | | HHHW | 2020 |
| | | | | | | | | | (https://www.biorxiv.org/ |
| | | | | | | | | | content/10.1101/ |
| | | | | | | | | | 2020.05.20.106609v2) |
| | | | | | | MD62 | 4276 | QQANSFPL | Tal Noy-Porat et al., |
| | | | | | | | | T | 2020 |
| | | | | | | | | | (https://www.biorxiv.org/ |
| | | | | | | | | | content/10.1101/ |
| | | | | | | | | | 2020.05.20.106609v2) |
| | | | | | | MD63 | 4277 | QQSYSTPY | Tal Noy-Porat et al., |
| | | | | | | | | T | 2020 |
| | | | | | | | | | (https://www.biorxiv.org/ |
| | | | | | | | | | content/10.1101/ |
| | | | | | | | | | 2020.05.20.106609v2) |
| | | | | | | MD65 | 4278 | QQYGSSPL | Tal Noy-Porat et al., |
| | | | | | | | | T | 2020 |
| | | | | | | | | | (https://www.biorxiv.org/ |
| | | | | | | | | | content/10.1101/ |
| | | | | | | | | | 2020.05.20.106609v2) |
| | | | | | | MD67 | 4279 | QQFGSSPL | Tal Noy-Porat et al., |
| | | | | | | | | T | 2020 |
| | | | | | | | | | (https://www.biorxiv.org/ |
| | | | | | | | | | content/10.1101/ |
| | | | | | | | | | 2020.05.20.106609v2) |
| | | | | | | mNb6 | | ND | Michael Schoof et al., |
| | | | | | | | | | 2020 |
| | | | | | | | | | (https://www.biorxiv.org/ |
| | | | | | | | | | content/10.1101/ |
| | | | | | | | | | 2020.08.08.238469v1.full. |
| | | | | | | | | | pdf) |
| | | | | | | mNb6-tri | | ND | Michael Schoof et al., |
| | | | | | | | | | 2020 |
| | | | | | | | | | (https://www.biorxiv.org/ |
| | | | | | | | | | content/10.1101/ |
| | | | | | | | | | 2020.08.08.238469v1.full. |
| | | | | | | | | | pdf) |
| | | | | | | MnCit3p1_ | 4280 | LLSYTGAR | Christoph Kreer et al., |
| | | | | | | G9 | | V | 2020 |
| | | | | | | | | | (https://doi.org/10.1016/ |
| | | | | | | | | | j.cell.2020.06.044) |
| | | | | | | MnC2t1p1_ | 4281 | QQANSFP | Christoph Kreer et al., |
| | | | | | | A3 | | GT | 2020 |
| | | | | | | | | | (https://doi.org/10.1016/ |
| | | | | | | | | | j.cell.2020.06.044) |
| | | | | | | MnC2t1p1_ | 4282 | QQANSFP | Christoph Kreer et al., |
| | | | | | | C5 | | GT | 2020 |
| | | | | | | | | | (https://doi.org/10.1016/ |
| | | | | | | | | | j.cell.2020.06.044) |
| | | | | | | MnC2t2p1_ | 4283 | QQSYSTLY | Christoph Kreer et al., |
| | | | | | | C11 | | S | 2020 |
| | | | | | | | | | (https://doi.org/10.1016/ |
| | | | | | | | | | j.cell.2020.06.044) |
| | | | | | | MnC4t1p1_ | 4284 | LQHNTYPF | Christoph Kreer et al., |
| | | | | | | A10 | | T | 2020 |
| | | | | | | | | | (https://doi.org/10.1016/ |
| | | | | | | | | | j.cell.2020.06.044) |
| | | | | | | MnC4t1p1_ | 4285 | HQYGSSP | Christoph Kreer et al., |
| | | | | | | A11 | | WT | 2020 |
| | | | | | | | | | (https://doi.org/10.1016/ |
| | | | | | | | | | j.cell.2020.06.044) |
| | | | | | | MnC4t2p1_ | 4286 | QQGNSFPF | Christoph Kreer et al., |
| | | | | | | B3 | | T | 2020 |
| | | | | | | | | | (https://doi.org/10.1016/ |
| | | | | | | | | | j.cell.2020.06.044) |
| | | | | | | MnC4t2p1_ | 4287 | LQHNTYPF | Christoph Kreer et al., |
| | | | | | | D10 | | T | 2020 |
| | | | | | | | | | (https://doi.org/10.1016/ |
| | | | | | | | | | j.cell.2020.06.044) |
| | | | | | | MnC4t2p1_ | 4288 | QQGNSFPF | Christoph Kreer et al., |
| | | | | | | E6 | | T | 2020 |
| | | | | | | | | | (https://doi.org/10.1016/ |
| | | | | | | | | | j.cell.2020.06.044) |
| | | | | | | MnC4t2p1_ | 4289 | LQHNTYPF | Christoph Kreer et al., |
| | | | | | | F5 | | T | 2020 |
| | | | | | | | | | (https://doi.org/10.1016/ |
| | | | | | | | | | j.cell.2020.06.044) |
| | | | | | | MnC4t2p2_ | 4290 | QHFGTSSV | Christoph Kreer et al., |
| | | | | | | A4 | | T | 2020 |
| | | | | | | | | | (https://doi.org/10.1016/ |
| | | | | | | | | | j.cell.2020.06.044) |
| | | | | | | MnC5t2p1_ | 4291 | QQYGSSP | Christoph Kreer et al., |
| | | | | | | G1 | | WT | 2020 |
| | | | | | | | | | (https://doi.org/10.1016/ |
| | | | | | | | | | j.cell.2020.06.044) |
| | | | | | | MR10 | | N/A | Tingting Li et al., 2020 |
| | | | | | | | | | (https://www.biorxiv.org/ |
| | | | | | | | | | content/10.1101/ |
| | | | | | | | | | 2020.06.09.143438v1) |
| | | | | | | MR14 | | N/A | Tingting Li et al., 2020 |
| | | | | | | | | | (https://www.biorxiv.org/ |
| | | | | | | | | | content/10.1101/ |
| | | | | | | | | | 2020.06.09.143438v1) |
| | | | | | | MR17 | | N/A | Tingting Li et al., 2020 |
| | | | | | | | | | (https://www.biorxiv.org/ |
| | | | | | | | | | content/10.1101/ |
| | | | | | | | | | 2020.06.09.143438v1) |
| | | | | | | MR17_K56W | | N/A | Tingting Li et al., 2020 |
| | | | | | | | | | (https://www.biorxiv.org/ |
| | | | | | | | | | content/10.1101/ |
| | | | | | | | | | 2020.06.09.143438v1) |
| | | | | | | MR17_K99W | | N/A | Tingting Li et al., 2020 |
| | | | | | | | | | (https://www.biorxiv.org/ |
| | | | | | | | | | content/10.1101/ |
| | | | | | | | | | 2020.06.09.143438v1) |
| | | | | | | MR17_K99Y | | N/A | Tingting Li et al., 2020 |
| | | | | | | | | | (https://www.biorxiv.org/ |
| | | | | | | | | | content/10.1101/ |
| | | | | | | | | | 2020.06.09.143438v1) |
| | | | | | | MR2 | | N/A | Tingting Li et al., 2020 |
| | | | | | | | | | (https://www.biorxiv.org/ |
| | | | | | | | | | content/10.1101/ |
| | | | | | | | | | 2020.06.09.143438v1) |
| | | | | | | MR3 | | N/A | Tingting Li et al., 2020 |
| | | | | | | | | | (https://www.biorxiv.org/ |
| | | | | | | | | | content/10.1101/ |
| | | | | | | | | | 2020.06.09.143438v1) |
| | | | | | | MR4 | | N/A | Tingting Li et al., 2020 |
| | | | | | | | | | (https://www.biorxiv.org/ |
| | | | | | | | | | content/10.1101/ |
| | | | | | | | | | 2020.06.09.143438v1) |
| | | | | | | MR6 | | N/A | Tingting Li et al., 2020 |
| | | | | | | | | | (https://www.biorxiv.org/ |
| | | | | | | | | | content/10.1101/ |
| | | | | | | | | | 2020.06.09.143438v1) |
| | | | | | | MR7 | | N/A | Tingting Li et al., 2020 |
| | | | | | | | | | (https://www.biorxiv.org/ |
| | | | | | | | | | content/10.1101/ |
| | | | | | | | | | 2020.06.09.143438v1) |
| | | | | | | MR8 | | N/A | Tingting Li et al., 2020 |
| | | | | | | | | | (https://www.biorxiv.org/ |
| | | | | | | | | | content/10.1101/ |
| | | | | | | | | | 2020.06.09.143438v1) |
| | | | | | | Nb11 | | ND | Michael Schoof et al., |
| | | | | | | | | | 2020 |
| | | | | | | | | | (https://www.biorxiv.org/ |
| | | | | | | | | | content/10.1101/ |
| | | | | | | | | | 2020.08.08.238469v1.full. |
| | | | | | | | | | pdf) |
| | | | | | | Nb11-59 | | ND | Junwei Gai et al., 2020 |
| | | | | | | | | | (https://www.biorxiv.org/ |
| | | | | | | | | | content/10.1101/ |
| | | | | | | | | | 2020.08.09.242867v1.full. |
| | | | | | | | | | pdf) |
| | | | | | | Nb3 | | ND | Michael Schoof et al., |
| | | | | | | | | | 2020 |
| | | | | | | | | | (https://www.biorxiv.org/ |
| | | | | | | | | | content/10.1101/ |
| | | | | | | | | | 2020.08.08.238469v1.full. |
| | | | | | | | | | pdf) |
| | | | | | | Nb3-bi | | ND | Michael Schoof et al., |
| | | | | | | | | | 2020 |
| | | | | | | | | | (https://www.biorxiv.org/ |
| | | | | | | | | | content/10.1101/ |
| | | | | | | | | | 2020.08.08.238469v1.full. |
| | | | | | | | | | pdf) |
| | | | | | | Nb3-tri | | ND | Michael Schoof et al., |
| | | | | | | | | | 2020 |
| | | | | | | | | | (https://www.biorxiv.org/ |
| | | | | | | | | | content/10.1101/ |
| | | | | | | | | | 2020.08.08.238469v1.full. |
| | | | | | | | | | pdf) |
| | | | | | | Nb4-43 | | ND | Junwei Gai et al., 2020 |
| | | | | | | | | | (https://www.biorxiv.org/ |
| | | | | | | | | | content/10.1101/ |
| | | | | | | | | | 2020.08.09.242867v1.full. |
| | | | | | | | | | pdf) |
| | | | | | | Nb6 | | ND | Michael Schoof et al., |
| | | | | | | | | | 2020 |
| | | | | | | | | | (https://www.biorxiv.org/ |
| | | | | | | | | | content/10.1101/ |
| | | | | | | | | | 2020.08.08.238469v1.full. |
| | | | | | | | | | pdf) |
| | | | | | | Nb6-tri | | ND | Michael Schoof et al., |
| | | | | | | | | | 2020 |
| | | | | | | | | | (https://www.biorxiv.org/ |
| | | | | | | | | | content/10.1101/ |
| | | | | | | | | | 2020.08.08.238469v1.full. |
| | | | | | | | | | pdf) |
| | | | | | | NIH- | | N/A | Thomas Esparza et al., |
| | | | | | | CoVnb- | | | 2020 |
| | | | | | | 101 | | | (https://www.biorxiv.org/ |
| | | | | | | | | | content/10.1101/ |
| | | | | | | | | | 2020.07.24.219857v1) |
| | | | | | | NIH- | | N/A | Thomas Esparza et al., |
| | | | | | | CoVnb- | | | 2020 |
| | | | | | | 102 | | | (https://www.biorxiv.org/ |
| | | | | | | | | | content/10.1101/ |
| | | | | | | | | | 2020.07.24.219857v1) |
| | | | | | | NIH- | | N/A | Thomas Esparza et al., |
| | | | | | | CoVnb- | | | 2020 |
| | | | | | | 103 | | | (https://www.biorxiv.org/ |
| | | | | | | | | | content/10.1101/ |
| | | | | | | | | | 2020.07.24.219857v1) |
| | | | | | | NIH- | | N/A | Thomas Esparza et al., |
| | | | | | | CoVnb- | | | 2020 |
| | | | | | | 104 | | | (https://www.biorxiv.org/ |
| | | | | | | | | | content/10.1101/ |
| | | | | | | | | | 2020.07.24.219857v1) |
| | | | | | | NIH- | | N/A | Thomas Esparza et al., |
| | | | | | | CoVnb- | | | 2020 |
| | | | | | | 105 | | | (https://www.biorxiv.org/ |
| | | | | | | | | | content/10.1101/ |
| | | | | | | | | | 2020.07.24.219857v1) |
| | | | | | | NIH- | | N/A | Thomas Esparza et al., |
| | | | | | | CoVnb- | | | 2020 |
| | | | | | | 106 | | | (https://www.biorxiv.org/ |
| | | | | | | | | | content/10.1101/ |
| | | | | | | | | | 2020.07.24.219857v1) |
| | | | | | | NIH- | | N/A | Thomas Esparza et al., |
| | | | | | | CoVnb- | | | 2020 |
| | | | | | | 107 | | | (https://www.biorxiv.org/ |
| | | | | | | | | | content/10.1101/ |
| | | | | | | | | | 2020.07.24.219857v1) |
| | | | | | | NIH- | | N/A | Thomas Esparza et al., |
| | | | | | | CoVnb- | | | 2020 |
| | | | | | | 108 | | | (https://www.biorxiv.org/ |
| | | | | | | | | | content/10.1101/ |
| | | | | | | | | | 2020.07.24.219857v1) |
| | | | | | | NIH- | | N/A | Thomas Esparza et al., |
| | | | | | | CoVnb- | | | 2020 |
| | | | | | | 109 | | | (https://www.biorxiv.org/ |
| | | | | | | | | | content/10.1101/ |
| | | | | | | | | | 2020.07.24.219857v1) |
| | | | | | | NIH- | | N/A | Thomas Esparza et al., |
| | | | | | | CoVnb- | | | 2020 |
| | | | | | | 110 | | | (https://www.biorxiv.org/ |
| | | | | | | | | | content/10.1101/ |
| | | | | | | | | | 2020.07.24.219857v1) |
| | | | | | | NIH- | | N/A | Thomas Esparza et al., |
| | | | | | | CoVnb- | | | 2020 |
| | | | | | | 111 | | | (https://www.biorxiv.org/ |
| | | | | | | | | | content/10.1101/ |
| | | | | | | | | | 2020.07.24.219857v1) |
| | | | | | | NIH- | | N/A | Thomas Esparza et al., |
| | | | | | | CoVnb- | | | 2020 |
| | | | | | | 112 | | | (https://www.biorxiv.org/ |
| | | | | | | | | | content/10.1101/ |
| | | | | | | | | | 2020.07.24.219857v1) |
| | | | | | | NIH- | | N/A | Thomas Esparza et al., |
| | | | | | | CoVnb- | | | 2020 |
| | | | | | | 113 | | | (https://www.biorxiv.org/ |
| | | | | | | | | | content/10.1101/ |
| | | | | | | | | | 2020.07.24.219857v1) |
| | | | | | | P2B-2F6 | 4292 | SSYAGSNN | Bin Ju et al., 2020 |
| | | | | | | | | LV | (https://www.nature.com/ |
| | | | | | | | | | articles/s41586-020- |
| | | | | | | | | | 2380-z) |
| | | | | | | S110 | 4293 | MQGTHW | Dora Pinto et al., 2020 |
| | | | | | | | | PPT | (https://www.nature.com/ |
| | | | | | | | | | articles/s41586-020- |
| | | | | | | | | | 2349-y) |
| | | | | | | S124 | 4294 | QQSYSTPP | Dora Pinto et al., 2020 |
| | | | | | | | | T | (https://www.nature.com/ |
| | | | | | | | | | articles/s41586-020- |
| | | | | | | | | | 2349-y) |
| | | | | | | S303 | 4295 | QQYDTYS | Dora Pinto et al., 2020 |
| | | | | | | | | WT | (https://www.nature.com/ |
| | | | | | | | | | articles/s41586-020- |
| | | | | | | | | | 2349-y) |
| | | | | | | S304 | 4296 | QQSYVSPT | Dora Pinto et al., 2020 |
| | | | | | | | | | (https://www.nature.com/ |
| | | | | | | | | | articles/s41586-020- |
| | | | | | | | | | 2349-y) |
| | | | | | | S306 | 4297 | QQRSNWP | Dora Pinto et al., 2020 |
| | | | | | | | | PGCS | (https://www.nature.com/ |
| | | | | | | | | | articles/s41586-020- |
| | | | | | | | | | 2349-y) |
| | | | | | | S309 | 4298 | QQHDTSLT | Dora Pinto et al., 2020 |
| | | | | | | | | | (https://www.nature.com/ |
| | | | | | | | | | articles/s41586-020- |
| | | | | | | | | | 2349-y) |
| | | | | | | S310 | 4299 | CSYAGSDT | Dora Pinto et al., 2020 |
| | | | | | | | | VI | (https://www.nature.com/ |
| | | | | | | | | | articles/s41586-020- |
| | | | | | | | | | 2349-y) |
| | | | | | | S315 | 4300 | QSADSSGT | Dora Pinto et al., 2020 |
| | | | | | | | | V | (https://www.nature.co |
| | | | | | | | | | m/articles/s41586-020- |
| | | | | | | | | | 2349-y) |
| | | | | | | Sb#1 | | N/A | Justin Walter et al., |
| | | | | | | | | | 2020 |
| | | | | | | | | | (https://www.biorxiv.org/ |
| | | | | | | | | | content/10.1101/ |
| | | | | | | | | | 2020.04.16.045419v2) |
| | | | | | | Sb#10 | | N/A | Justin Walter et al., |
| | | | | | | | | | 2020 |
| | | | | | | | | | (https://www.biorxiv.org/ |
| | | | | | | | | | content/10.1101/ |
| | | | | | | | | | 2020.04.16.045419v2) |
| | | | | | | Sb#11 | | N/A | Justin Walter et al., |
| | | | | | | | | | 2020 |
| | | | | | | | | | (https://www.biorxiv.org/ |
| | | | | | | | | | content/10.1101/ |
| | | | | | | | | | 2020.04.16.045419v2) |
| | | | | | | Sb#12 | | N/A | Justin Walter et al., |
| | | | | | | | | | 2020 |
| | | | | | | | | | (https://www.biorxiv.org/ |
| | | | | | | | | | content/10.1101/ |
| | | | | | | | | | 2020.04.16.045419v2) |
| | | | | | | Sb#13 | | N/A | Justin Walter et al., |
| | | | | | | | | | 2020 |
| | | | | | | | | | (https://www.biorxiv.org/ |
| | | | | | | | | | content/10.1101/ |
| | | | | | | | | | 2020.04.16.045419v2) |
| | | | | | | Sb#14 | | N/A | Justin Walter et al., |
| | | | | | | | | | 2020 |
| | | | | | | | | | (https://www.biorxiv.org/ |
| | | | | | | | | | content/10.1101/ |
| | | | | | | | | | 2020.04.16.045419v2) |
| | | | | | | Sb#15 | | N/A | Justin Walter et al., |
| | | | | | | | | | 2020 |
| | | | | | | | | | (https://www.biorxiv.org/ |
| | | | | | | | | | content/10.1101/ |
| | | | | | | | | | 2020.04.16.045419v2) |
| | | | | | | Sb#16 | | N/A | Justin Walter et al., |
| | | | | | | | | | 2020 |
| | | | | | | | | | (https://www.biorxiv.org/ |
| | | | | | | | | | content/10.1101/ |
| | | | | | | | | | 2020.04.16.045419v2) |
| | | | | | | Sb#17 | | N/A | Justin Walter et al., |
| | | | | | | | | | 2020 |
| | | | | | | | | | (https://www.biorxiv.org/ |
| | | | | | | | | | content/10.1101/ |
| | | | | | | | | | 2020.04.16.045419v2) |
| | | | | | | Sb#18 | | N/A | Justin Walter et al., |
| | | | | | | | | | 2020 |
| | | | | | | | | | (https://www.biorxiv.org/ |
| | | | | | | | | | content/10.1101/ |
| | | | | | | | | | 2020.04.16.045419v2) |
| | | | | | | Sb#19 | | N/A | Justin Walter et al., |
| | | | | | | | | | 2020 |
| | | | | | | | | | (https://www.biorxiv.org/ |
| | | | | | | | | | content/10.1101/ |
| | | | | | | | | | 2020.04.16.045419v2) |
| | | | | | | Sb#2 | | N/A | Justin Walter et al., |
| | | | | | | | | | 2020 |
| | | | | | | | | | (https://www.biorxiv.org/ |
| | | | | | | | | | content/10.1101/ |
| | | | | | | | | | 2020.04.16.045419v2) |
| | | | | | | Sb#20 | | N/A | Justin Walter et al., |
| | | | | | | | | | 2020 |
| | | | | | | | | | (https://www.biorxiv.org/ |
| | | | | | | | | | content/10.1101/ |
| | | | | | | | | | 2020.04.16.045419v2) |
| | | | | | | Sb#21 | | N/A | Justin Walter et al., |
| | | | | | | | | | 2020 |
| | | | | | | | | | (https://www.biorxiv.org/ |
| | | | | | | | | | content/10.1101/ |
| | | | | | | | | | 2020.04.16.045419v2) |
| | | | | | | Sb#22 | | N/A | Justin Walter et al., |
| | | | | | | | | | 2020 |
| | | | | | | | | | (https://www.biorxiv.org/ |
| | | | | | | | | | content/10.1101/ |
| | | | | | | | | | 2020.04.16.045419v2) |
| | | | | | | Sb#23 | | N/A | Justin Walter et al., |
| | | | | | | | | | 2020 |
| | | | | | | | | | (https://www.biorxiv.org/ |
| | | | | | | | | | content/10.1101/ |
| | | | | | | | | | 2020.04.16.045419v2) |
| | | | | | | Sb#25 | | N/A | Justin Walter et al., |
| | | | | | | | | | 2020 |
| | | | | | | | | | (https://www.biorxiv.org/ |
| | | | | | | | | | content/10.1101/ |
| | | | | | | | | | 2020.04.16.045419v2) |
| | | | | | | Sb#26 | | N/A | Justin Walter et al., |
| | | | | | | | | | 2020 |
| | | | | | | | | | (https://www.biorxiv.org/ |
| | | | | | | | | | content/10.1101/ |
| | | | | | | | | | 2020.04.16.045419v2) |
| | | | | | | Sb#27 | | N/A | Justin Walter et al., |
| | | | | | | | | | 2020 |
| | | | | | | | | | (https://www.biorxiv.org/ |
| | | | | | | | | | content/10.1101/ |
| | | | | | | | | | 2020.04.16.045419v2) |
| | | | | | | Sb#28 | | N/A | Justin Walter et al., |
| | | | | | | | | | 2020 |
| | | | | | | | | | (https://www.biorxiv.org/ |
| | | | | | | | | | content/10.1101/ |
| | | | | | | | | | 2020.04.16.045419v2) |
| | | | | | | Sb#29 | | N/A | Justin Walter et al., |
| | | | | | | | | | 2020 |
| | | | | | | | | | (https://www.biorxiv.org/ |
| | | | | | | | | | content/10.1101/ |
| | | | | | | | | | 2020.04.16.045419v2) |
| | | | | | | Sb#3 | | N/A | Justin Walter et al., |
| | | | | | | | | | 2020 |
| | | | | | | | | | (https://www.biorxiv.org/ |
| | | | | | | | | | content/10.1101/ |
| | | | | | | | | | 2020.04.16.045419v2) |
| | | | | | | Sb#30 | | N/A | Justin Walter et al., |
| | | | | | | | | | 2020 |
| | | | | | | | | | (https://www.biorxiv.org/ |
| | | | | | | | | | content/10.1101/ |
| | | | | | | | | | 2020.04.16.045419v2) |
| | | | | | | Sb#31 | | N/A | Justin Walter et al., |
| | | | | | | | | | 2020 |
| | | | | | | | | | (https://www.biorxiv.org/ |
| | | | | | | | | | content/10.1101/ |
| | | | | | | | | | 2020.04.16.045419v2) |
| | | | | | | Sb#32 | | N/A | Justin Walter et al., |
| | | | | | | | | | 2020 |
| | | | | | | | | | (https://www.biorxiv.org/ |
| | | | | | | | | | content/10.1101/ |
| | | | | | | | | | 2020.04.16.045419v2) |
| | | | | | | Sb#33 | | N/A | Justin Walter et al., |
| | | | | | | | | | 2020 |
| | | | | | | | | | (https://www.biorxiv.org/ |
| | | | | | | | | | content/10.1101/ |
| | | | | | | | | | 2020.04.16.045419v2) |
| | | | | | | Sb#34 | | N/A | Justin Walter et al., |
| | | | | | | | | | 2020 |
| | | | | | | | | | (https://www.biorxiv.org/ |
| | | | | | | | | | content/10.1101/ |
| | | | | | | | | | 2020.04.16.045419v2) |
| | | | | | | Sb#35 | | N/A | Justin Walter et al., |
| | | | | | | | | | 2020 |
| | | | | | | | | | (https://www.biorxiv.org/ |
| | | | | | | | | | content/10.1101/ |
| | | | | | | | | | 2020.04.16.045419v2) |
| | | | | | | Sb#36 | | N/A | Justin Walter et al., |
| | | | | | | | | | 2020 |
| | | | | | | | | | (https://www.biorxiv.org/ |
| | | | | | | | | | content/10.1101/ |
| | | | | | | | | | 2020.04.16.045419v2) |
| | | | | | | Sb#37 | | N/A | Justin Walter et al., |
| | | | | | | | | | 2020 |
| | | | | | | | | | (https://www.biorxiv.org/ |
| | | | | | | | | | content/10.1101/ |
| | | | | | | | | | 2020.04.16.045419v2) |
| | | | | | | Sb#38 | | N/A | Justin Walter et al., |
| | | | | | | | | | 2020 |
| | | | | | | | | | (https://www.biorxiv.org/ |
| | | | | | | | | | content/10.1101/ |
| | | | | | | | | | 2020.04.16.045419v2) |
| | | | | | | Sb#39 | | N/A | Justin Walter et al., |
| | | | | | | | | | 2020 |
| | | | | | | | | | (https://www.biorxiv.org/ |
| | | | | | | | | | content/10.1101/ |
| | | | | | | | | | 2020.04.16.045419v2) |
| | | | | | | Sb#4 | | N/A | Justin Walter et al., |
| | | | | | | | | | 2020 |
| | | | | | | | | | (https://www.biorxiv.org/ |
| | | | | | | | | | content/10.1101/ |
| | | | | | | | | | 2020.04.16.045419v2) |
| | | | | | | Sb#40 | | N/A | Justin Walter et al., |
| | | | | | | | | | 2020 |
| | | | | | | | | | (https://www.biorxiv.org/ |
| | | | | | | | | | content/10.1101/ |
| | | | | | | | | | 2020.04.16.045419v2) |
| | | | | | | Sb#41 | | N/A | Justin Walter et al., |
| | | | | | | | | | 2020 |
| | | | | | | | | | (https://www.biorxiv.org/ |
| | | | | | | | | | content/10.1101/ |
| | | | | | | | | | 2020.04.16.045419v2) |
| | | | | | | Sb#42 | | N/A | Justin Walter et al., |
| | | | | | | | | | 2020 |
| | | | | | | | | | (https://www.biorxiv.org/ |
| | | | | | | | | | content/10.1101/ |
| | | | | | | | | | 2020.04.16.045419v2) |
| | | | | | | Sb#45 | | N/A | Justin Walter et al., |
| | | | | | | | | | 2020 |
| | | | | | | | | | (https://www.biorxiv.org/ |
| | | | | | | | | | content/10.1101/ |
| | | | | | | | | | 2020.04.16.045419v2) |
| | | | | | | Sb#46 | | N/A | Justin Walter et al., |
| | | | | | | | | | 2020 |
| | | | | | | | | | (https://www.biorxiv.org/ |
| | | | | | | | | | content/10.1101/ |
| | | | | | | | | | 2020.04.16.045419v2) |
| | | | | | | Sb#47 | | N/A | Justin Walter et al., |
| | | | | | | | | | 2020 |
| | | | | | | | | | (https://www.biorxiv.org/ |
| | | | | | | | | | content/10.1101/ |
| | | | | | | | | | 2020.04.16.045419v2) |
| | | | | | | Sb#48 | | N/A | Justin Walter et al., |
| | | | | | | | | | 2020 |
| | | | | | | | | | (https://www.biorxiv.org/ |
| | | | | | | | | | content/10.1101/ |
| | | | | | | | | | 2020.04.16.045419v2) |
| | | | | | | Sb#49 | | N/A | Justin Walter et al., |
| | | | | | | | | | 2020 |
| | | | | | | | | | (https://www.biorxiv.org/ |
| | | | | | | | | | content/10.1101/ |
| | | | | | | | | | 2020.04.16.045419v2) |
| | | | | | | Sb#5 | | N/A | Justin Walter et al., |
| | | | | | | | | | 2020 |
| | | | | | | | | | (https://www.biorxiv.org/ |
| | | | | | | | | | content/10.1101/ |
| | | | | | | | | | 2020.04.16.045419v2) |
| | | | | | | Sb#50 | | N/A | Justin Walter et al., |
| | | | | | | | | | 2020 |
| | | | | | | | | | (https://www.biorxiv.org/ |
| | | | | | | | | | content/10.1101/ |
| | | | | | | | | | 2020.04.16.045419v2) |
| | | | | | | Sb#51 | | N/A | Justin Walter et al., |
| | | | | | | | | | 2020 |
| | | | | | | | | | (https://www.biorxiv.org/ |
| | | | | | | | | | content/10.1101/ |
| | | | | | | | | | 2020.04.16.045419v2) |
| | | | | | | Sb#52 | | N/A | Justin Walter et al., |
| | | | | | | | | | 2020 |
| | | | | | | | | | (https://www.biorxiv.org/ |
| | | | | | | | | | content/10.1101/ |
| | | | | | | | | | 2020.04.16.045419v2) |
| | | | | | | Sb#53 | | N/A | Justin Walter et al., |
| | | | | | | | | | 2020 |
| | | | | | | | | | (https://www.biorxiv.org/ |
| | | | | | | | | | content/10.1101/ |
| | | | | | | | | | 2020.04.16.045419v2) |
| | | | | | | Sb#55 | | N/A | Justin Walter et al., |
| | | | | | | | | | 2020 |
| | | | | | | | | | (https://www.biorxiv.org/ |
| | | | | | | | | | content/10.1101/ |
| | | | | | | | | | 2020.04.16.045419v2) |
| | | | | | | Sb#56 | | N/A | Justin Walter et al., |
| | | | | | | | | | 2020 |
| | | | | | | | | | (https://www.biorxiv.org/ |
| | | | | | | | | | content/10.1101/ |
| | | | | | | | | | 2020.04.16.045419v2) |
| | | | | | | Sb#58 | | N/A | Justin Walter et al., |
| | | | | | | | | | 2020 |
| | | | | | | | | | (https://www.biorxiv.org/ |
| | | | | | | | | | content/10.1101/ |
| | | | | | | | | | 2020.04.16.045419v2) |
| | | | | | | Sb#59 | | N/A | Justin Walter et al., |
| | | | | | | | | | 2020 |
| | | | | | | | | | (https://www.biorxiv.org/ |
| | | | | | | | | | content/10.1101/ |
| | | | | | | | | | 2020.04.16.045419v2) |
| | | | | | | Sb#6 | | N/A | Justin Walter et al., |
| | | | | | | | | | 2020 |
| | | | | | | | | | (https://www.biorxiv.org/ |
| | | | | | | | | | content/10.1101/ |
| | | | | | | | | | 2020.04.16.045419v2) |
| | | | | | | Sb#61 | | N/A | Justin Walter et al., |
| | | | | | | | | | 2020 |
| | | | | | | | | | (https://www.biorxiv.org/ |
| | | | | | | | | | content/10.1101/ |
| | | | | | | | | | 2020.04.16.045419v2) |
| | | | | | | Sb#62 | | N/A | Justin Walter et al., |
| | | | | | | | | | 2020 |
| | | | | | | | | | (https://www.biorxiv.org/ |
| | | | | | | | | | content/10.1101/ |
| | | | | | | | | | 2020.04.16.045419v2) |
| | | | | | | Sb#63 | | N/A | Justin Walter et al., |
| | | | | | | | | | 2020 |
| | | | | | | | | | (https://www.biorxiv.org/ |
| | | | | | | | | | content/10.1101/ |
| | | | | | | | | | 2020.04.16.045419v2) |
| | | | | | | Sb#64 | | N/A | Justin Walter et al., |
| | | | | | | | | | 2020 |
| | | | | | | | | | (https://www.biorxiv.org/ |
| | | | | | | | | | content/10.1101/ |
| | | | | | | | | | 2020.04.16.045419v2) |
| | | | | | | Sb#65 | | N/A | Justin Walter et al., |
| | | | | | | | | | 2020 |
| | | | | | | | | | (https://www.biorxiv.org/ |
| | | | | | | | | | content/10.1101/ |
| | | | | | | | | | 2020.04.16.045419v2) |
| | | | | | | Sb#66 | | N/A | Justin Walter et al., |
| | | | | | | | | | 2020 |
| | | | | | | | | | (https://www.biorxiv.org/ |
| | | | | | | | | | content/10.1101/ |
| | | | | | | | | | 2020.04.16.045419v2) |
| | | | | | | Sb#67 | | N/A | Justin Walter et al., |
| | | | | | | | | | 2020 |
| | | | | | | | | | (https://www.biorxiv.org/ |
| | | | | | | | | | content/10.1101/ |
| | | | | | | | | | 2020.04.16.045419v2) |
| | | | | | | Sb#68 | | N/A | Justin Walter et al., |
| | | | | | | | | | 2020 |
| | | | | | | | | | (https://www.biorxiv.org/ |
| | | | | | | | | | content/10.1101/ |
| | | | | | | | | | 2020.04.16.045419v2) |
| | | | | | | Sb#69 | | N/A | Justin Walter et al., |
| | | | | | | | | | 2020 |
| | | | | | | | | | (https://www.biorxiv.org/ |
| | | | | | | | | | content/10.1101/ |
| | | | | | | | | | 2020.04.16.045419v2) |
| | | | | | | Sb#7 | | N/A | Justin Walter et al., |
| | | | | | | | | | 2020 |
| | | | | | | | | | (https://www.biorxiv.org/ |
| | | | | | | | | | content/10.1101/ |
| | | | | | | | | | 2020.04.16.045419v2) |
| | | | | | | Sb#71 | | N/A | Justin Walter et al., |
| | | | | | | | | | 2020 |
| | | | | | | | | | (https://www.biorxiv.org/ |
| | | | | | | | | | content/10.1101/ |
| | | | | | | | | | 2020.04.16.045419v2) |
| | | | | | | Sb#8 | | N/A | Justin Walter et al., |
| | | | | | | | | | 2020 |
| | | | | | | | | | (https://www.biorxiv.org/ |
| | | | | | | | | | content/10.1101/ |
| | | | | | | | | | 2020.04.16.045419v2) |
| | | | | | | Sb#9 | | N/A | Justin Walter et al., |
| | | | | | | | | | 2020 |
| | | | | | | | | | (https://www.biorxiv.org/ |
| | | | | | | | | | content/10.1101/ |
| | | | | | | | | | 2020.04.16.045419v2) |
| | | | | | | Sb100 | | N/A | Tania Custodia et al., |
| | | | | | | | | | 2020 |
| | | | | | | | | | (https://www.biorxiv.or |
| | | | | | | | | | g/content/10.1101/202 |
| | | | | | | | | | 0.06.23.165415v1.full.p |
| | | | | | | | | | df+html) |
| | | | | | | Sb12 | | N/A | Tania Custodia et al., |
| | | | | | | | | | 2020 |
| | | | | | | | | | (https://www.biorxiv.or |
| | | | | | | | | | g/content/10.1101/202 |
| | | | | | | | | | 0.06.23.165415v1.full.p |
| | | | | | | | | | df+html) |
| | | | | | | Sb13 | | N/A | Tania Custodia et al., |
| | | | | | | | | | 2020 |
| | | | | | | | | | (https://www.biorxiv.org/ |
| | | | | | | | | | content/10.1101/ |
| | | | | | | | | | 2020.06.23.165415v1.full. |
| | | | | | | | | | pdf + html) |
| | | | | | | Sb15 | | N/A | Tania Custodia et al., |
| | | | | | | | | | 2020 |
| | | | | | | | | | (https://www.biorxiv.org/ |
| | | | | | | | | | content/10.1101/ |
| | | | | | | | | | 2020.06.23.165415v1.full. |
| | | | | | | | | | pdf + html) |
| | | | | | | Sb16 | | N/A | Tania Custodia et al., |
| | | | | | | | | | 2020 |
| | | | | | | | | | (https://www.biorxiv.org/ |
| | | | | | | | | | content/10.1101/ |
| | | | | | | | | | 2020.06.23.165415v1.full. |
| | | | | | | | | | pdf + html) |
| | | | | | | Sb17 | | N/A | Tania Custodia et al., |
| | | | | | | | | | 2020 |
| | | | | | | | | | (https://www.biorxiv.org/ |
| | | | | | | | | | content/10.1101/ |
| | | | | | | | | | 2020.06.23.165415v1.full. |
| | | | | | | | | | pdf + html) |
| | | | | | | Sb2 | | N/A | Tania Custodia et al., |
| | | | | | | | | | 2020 |
| | | | | | | | | | (https://www.biorxiv.org/ |
| | | | | | | | | | content/10.1101/ |
| | | | | | | | | | 2020.06.23.165415v1.full. |
| | | | | | | | | | pdf + html) |
| | | | | | | Sb21 | | N/A | Tania Custodia et al., |
| | | | | | | | | | 2020 |
| | | | | | | | | | (https://www.biorxiv.org/ |
| | | | | | | | | | content/10.1101/ |
| | | | | | | | | | 2020.06.23.165415v1.full. |
| | | | | | | | | | pdf + html) |
| | | | | | | Sb22 | | N/A | Tania Custodia et al., |
| | | | | | | | | | 2020 |
| | | | | | | | | | (https://www.biorxiv.org/ |
| | | | | | | | | | content/10.1101/ |
| | | | | | | | | | 2020.06.23.165415v1.full. |
| | | | | | | | | | pdf + html) |
| | | | | | | Sb23 | | N/A | Tania Custodia et al., |
| | | | | | | | | | 2020 |
| | | | | | | | | | (https://www.biorxiv.org/ |
| | | | | | | | | | content/10.1101/ |
| | | | | | | | | | 2020.06.23.165415v1.full. |
| | | | | | | | | | pdf + html) |
| | | | | | | Sb25 | | N/A | Tania Custodia et al., |
| | | | | | | | | | 2020 |
| | | | | | | | | | (https://www.biorxiv.org/ |
| | | | | | | | | | content/10.1101/ |
| | | | | | | | | | 2020.06.23.165415v1.full. |
| | | | | | | | | | pdf + html) |
| | | | | | | Sb27 | | N/A | Tania Custodia et al., |
| | | | | | | | | | 2020 |
| | | | | | | | | | (https://www.biorxiv.org/ |
| | | | | | | | | | content/10.1101/ |
| | | | | | | | | | 2020.06.23.165415v1.full. |
| | | | | | | | | | pdf + html) |
| | | | | | | Sb28 | | N/A | Tania Custodia et al., |
| | | | | | | | | | 2020 |
| | | | | | | | | | (https://www.biorxiv.org/ |
| | | | | | | | | | content/10.1101/ |
| | | | | | | | | | 2020.06.23.165415v1.full. |
| | | | | | | | | | pdf + html) |
| | | | | | | Sb30 | | N/A | Tania Custodia et al., |
| | | | | | | | | | 2020 |
| | | | | | | | | | (https://www.biorxiv.org/ |
| | | | | | | | | | content/10.1101/ |
| | | | | | | | | | 2020.06.23.165415v1.full. |
| | | | | | | | | | pdf + html) |
| | | | | | | Sb32 | | N/A | Tania Custodia et al., |
| | | | | | | | | | 2020 |
| | | | | | | | | | (https://www.biorxiv.org/ |
| | | | | | | | | | content/10.1101/ |
| | | | | | | | | | 2020.06.23.165415v1.full. |
| | | | | | | | | | pdf + html) |
| | | | | | | Sb37 | | N/A | Tania Custodia et al., |
| | | | | | | | | | 2020 |
| | | | | | | | | | (https://www.biorxiv.org/ |
| | | | | | | | | | content/10.1101/ |
| | | | | | | | | | 2020.06.23.165415v1.full. |
| | | | | | | | | | pdf + html) |
| | | | | | | Sb38 | | N/A | Tania Custodia et al., |
| | | | | | | | | | 2020 |
| | | | | | | | | | (https://www.biorxiv.org/ |
| | | | | | | | | | content/10.1101/ |
| | | | | | | | | | 2020.06.23.165415v1.full. |
| | | | | | | | | | pdf + html) |
| | | | | | | Sb39 | | N/A | Tania Custodia et al., |
| | | | | | | | | | 2020 |
| | | | | | | | | | (https://www.biorxiv.org/ |
| | | | | | | | | | content/10.1101/ |
| | | | | | | | | | 2020.06.23.165415v1.full. |
| | | | | | | | | | pdf + html) |
| | | | | | | Sb40 | | N/A | Tania Custodia et al., |
| | | | | | | | | | 2020 |
| | | | | | | | | | (https://www.biorxiv.org/ |
| | | | | | | | | | content/10.1101/ |
| | | | | | | | | | 2020.06.23.165415v1.full. |
| | | | | | | | | | pdf + html) |
| | | | | | | Sb42 | | N/A | Tania Custodia et al., |
| | | | | | | | | | 2020 |
| | | | | | | | | | (https://www.biorxiv.org/ |
| | | | | | | | | | content/10.1101/ |
| | | | | | | | | | 2020.06.23.165415v1.full. |
| | | | | | | | | | pdf + html) |
| | | | | | | Sb43 | | N/A | Tania Custodia et al., |
| | | | | | | | | | 2020 |
| | | | | | | | | | (https://www.biorxiv.org/ |
| | | | | | | | | | content/10.1101/ |
| | | | | | | | | | 2020.06.23.165415v1.full. |
| | | | | | | | | | pdf + html) |
| | | | | | | Sb45 | | N/A | Tania Custodia et al., |
| | | | | | | | | | 2020 |
| | | | | | | | | | (https://www.biorxiv.org/ |
| | | | | | | | | | content/10.1101/ |
| | | | | | | | | | 2020.06.23.165415v1.full. |
| | | | | | | | | | pdf + html) |
| | | | | | | Sb46 | | N/A | Tania Custodia et al., |
| | | | | | | | | | 2020 |
| | | | | | | | | | (https://www.biorxiv.org/ |
| | | | | | | | | | content/10.1101/ |
| | | | | | | | | | 2020.06.23.165415v1.full. |
| | | | | | | | | | pdf + html) |
| | | | | | | Sb47 | | N/A | Tania Custodia et al., |
| | | | | | | | | | 2020 |
| | | | | | | | | | (https://www.biorxiv.org/ |
| | | | | | | | | | content/10.1101/ |
| | | | | | | | | | 2020.06.23.165415v1.full. |
| | | | | | | | | | pdf + html) |
| | | | | | | Sb5 | | N/A | Tania Custodia et al., |
| | | | | | | | | | 2020 |
| | | | | | | | | | (https://www.biorxiv.org/ |
| | | | | | | | | | content/10.1101/ |
| | | | | | | | | | 2020.06.23.165415v1.full. |
| | | | | | | | | | pdf + html) |
| | | | | | | Sb50 | | N/A | Tania Custodia et al., |
| | | | | | | | | | 2020 |
| | | | | | | | | | (https://www.biorxiv.org/ |
| | | | | | | | | | content/10.1101/ |
| | | | | | | | | | 2020.06.23.165415v1.full. |
| | | | | | | | | | pdf + html) |
| | | | | | | Sb52 | | N/A | Tania Custodia et al., |
| | | | | | | | | | 2020 |
| | | | | | | | | | (https://www.biorxiv.org/ |
| | | | | | | | | | content/10.1101/ |
| | | | | | | | | | 2020.06.23.165415v1.full. |
| | | | | | | | | | pdf + html) |
| | | | | | | Sb54 | | N/A | Tania Custodia et al., |
| | | | | | | | | | 2020 |
| | | | | | | | | | (https://www.biorxiv.org/ |
| | | | | | | | | | content/10.1101/ |
| | | | | | | | | | 2020.06.23.165415v1.full. |
| | | | | | | | | | pdf + html) |
| | | | | | | Sb56 | | N/A | Tania Custodia et al., |
| | | | | | | | | | 2020 |
| | | | | | | | | | (https://www.biorxiv.org/ |
| | | | | | | | | | content/10.1101/ |
| | | | | | | | | | 2020.06.23.165415v1.full. |
| | | | | | | | | | pdf + html) |
| | | | | | | Sb57 | | N/A | Tania Custodia et al., |
| | | | | | | | | | 2020 |
| | | | | | | | | | (https://www.biorxiv.org/ |
| | | | | | | | | | content/10.1101/ |
| | | | | | | | | | 2020.06.23.165415v1.full. |
| | | | | | | | | | pdf + html) |
| | | | | | | Sb58 | | N/A | Tania Custodia et al., |
| | | | | | | | | | 2020 |
| | | | | | | | | | (https://www.biorxiv.org/ |
| | | | | | | | | | content/10.1101/ |
| | | | | | | | | | 2020.06.23.165415v1.full. |
| | | | | | | | | | pdf + html) |
| | | | | | | Sb6 | | N/A | Tania Custodia et al., |
| | | | | | | | | | 2020 |
| | | | | | | | | | (https://www.biorxiv.org/ |
| | | | | | | | | | content/10.1101/ |
| | | | | | | | | | 2020.06.23.165415v1.full. |
| | | | | | | | | | pdf + html) |
| | | | | | | Sb60 | | N/A | Tania Custodia et al., |
| | | | | | | | | | 2020 |
| | | | | | | | | | (https://www.biorxiv.org/ |
| | | | | | | | | | content/10.1101/ |
| | | | | | | | | | 2020.06.23.165415v1.full. |
| | | | | | | | | | pdf + html) |
| | | | | | | Sb61 | | N/A | Tania Custodia et al., |
| | | | | | | | | | 2020 |
| | | | | | | | | | (https://www.biorxiv.org/ |
| | | | | | | | | | content/10.1101/ |
| | | | | | | | | | 2020.06.23.165415v1.full. |
| | | | | | | | | | pdf + html) |
| | | | | | | Sb62 | | N/A | Tania Custodia et al., |
| | | | | | | | | | 2020 |
| | | | | | | | | | (https://www.biorxiv.org/ |
| | | | | | | | | | content/10.1101/ |
| | | | | | | | | | 2020.06.23.165415v1.full. |
| | | | | | | | | | pdf + html) |
| | | | | | | Sb63 | | N/A | Tania Custodia et al., |
| | | | | | | | | | 2020 |
| | | | | | | | | | (https://www.biorxiv.org/ |
| | | | | | | | | | content/10.1101/ |
| | | | | | | | | | 2020.06.23.165415v1.full. |
| | | | | | | | | | pdf + html) |
| | | | | | | Sb67 | | N/A | Tania Custodia et al., |
| | | | | | | | | | 2020 |
| | | | | | | | | | (https://www.biorxiv.org/ |
| | | | | | | | | | content/10.1101/ |
| | | | | | | | | | 2020.06.23.165415v1.full. |
| | | | | | | | | | pdf + html) |
| | | | | | | Sb7 | | N/A | Tania Custodia et al., |
| | | | | | | | | | 2020 |
| | | | | | | | | | (https://www.biorxiv.org/ |
| | | | | | | | | | content/10.1101/ |
| | | | | | | | | | 2020.06.23.165415v1.full. |
| | | | | | | | | | pdf + html) |
| | | | | | | Sb71 | | N/A | Tania Custodia et al., |
| | | | | | | | | | 2020 |
| | | | | | | | | | (https://www.biorxiv.org/ |
| | | | | | | | | | content/10.1101/ |
| | | | | | | | | | 2020.06.23.165415v1.full. |
| | | | | | | | | | pdf + html) |
| | | | | | | Sb75 | | N/A | Tania Custodia et al., |
| | | | | | | | | | 2020 |
| | | | | | | | | | (https://www.biorxiv.org/ |
| | | | | | | | | | content/10.1101/ |
| | | | | | | | | | 2020.06.23.165415v1.full. |
| | | | | | | | | | pdf + html) |
| | | | | | | Sb76 | | N/A | Tania Custodia et al., |
| | | | | | | | | | 2020 |
| | | | | | | | | | (https://www.biorxiv.org/ |
| | | | | | | | | | content/10.1101/ |
| | | | | | | | | | 2020.06.23.165415v1.full. |
| | | | | | | | | | pdf + html) |
| | | | | | | Sb78 | | N/A | Tania Custodia et al., |
| | | | | | | | | | 2020 |
| | | | | | | | | | (https://www.biorxiv.org/ |
| | | | | | | | | | content/10.1101/ |
| | | | | | | | | | 2020.06.23.165415v1.full. |
| | | | | | | | | | pdf + html) |
| | | | | | | Sb8 | | N/A | Tania Custodia et al., |
| | | | | | | | | | 2020 |
| | | | | | | | | | (https://www.biorxiv.org/ |
| | | | | | | | | | content/10.1101/ |
| | | | | | | | | | 2020.06.23.165415v1.full. |
| | | | | | | | | | pdf + html) |
| | | | | | | Sb83 | | N/A | Tania Custodia et al., |
| | | | | | | | | | 2020 |
| | | | | | | | | | (https://www.biorxiv.org/ |
| | | | | | | | | | content/10.1101/ |
| | | | | | | | | | 2020.06.23.165415v1.full. |
| | | | | | | | | | pdf + html) |
| | | | | | | Sb84 | | N/A | Tania Custodia et al., |
| | | | | | | | | | 2020 |
| | | | | | | | | | (https://www.biorxiv.org/ |
| | | | | | | | | | content/10.1101/ |
| | | | | | | | | | 2020.06.23.165415v1.full. |
| | | | | | | | | | pdf + html) |
| | | | | | | Sb85 | | N/A | Tania Custodia et al., |
| | | | | | | | | | 2020 |
| | | | | | | | | | (https://www.biorxiv.org/ |
| | | | | | | | | | content/10.1101/ |
| | | | | | | | | | 2020.06.23.165415v1.full. |
| | | | | | | | | | pdf + html) |
| | | | | | | Sb88 | | N/A | Tania Custodia et al., |
| | | | | | | | | | 2020 |
| | | | | | | | | | (https://www.biorxiv.org/ |
| | | | | | | | | | content/10.1101/ |
| | | | | | | | | | 2020.06.23.165415v1.full. |
| | | | | | | | | | pdf + html) |
| | | | | | | Sb9 | | N/A | Tania Custodia et al., |
| | | | | | | | | | 2020 |
| | | | | | | | | | (https://www.biorxiv.org/ |
| | | | | | | | | | content/10.1101/ |
| | | | | | | | | | 2020.06.23.165415v1.full. |
| | | | | | | | | | pdf + html) |
| | | | | | | Sb90 | | N/A | Tania Custodia et al., |
| | | | | | | | | | 2020 |
| | | | | | | | | | (https://www.biorxiv.org/ |
| | | | | | | | | | content/10.1101/ |
| | | | | | | | | | 2020.06.23.165415v1.full. |
| | | | | | | | | | pdf + html) |
| | | | | | | Sb93 | | N/A | Tania Custodia et al., |
| | | | | | | | | | 2020 |
| | | | | | | | | | (https://www.biorxiv.org/ |
| | | | | | | | | | content/10.1101/ |
| | | | | | | | | | 2020.06.23.165415v1.full. |
| | | | | | | | | | pdf + html) |
| | | | | | | Sb94 | | N/A | Tania Custodia et al., |
| | | | | | | | | | 2020 |
| | | | | | | | | | (https://www.biorxiv.org/ |
| | | | | | | | | | content/10.1101/ |
| | | | | | | | | | 2020.06.23.165415v1.full. |
| | | | | | | | | | pdf + html) |
| | | | | | | Sb95 | | N/A | Tania Custodia et al., |
| | | | | | | | | | 2020 |
| | | | | | | | | | (https://www.biorxiv.org/ |
| | | | | | | | | | content/10.1101/ |
| | | | | | | | | | 2020.06.23.165415v1.full. |
| | | | | | | | | | pdf + html) |
| | | | | | | Sb97 | | N/A | Tania Custodia et al., |
| | | | | | | | | | 2020 |
| | | | | | | | | | (https://www.biorxiv.org/ |
| | | | | | | | | | content/10.1101/ |
| | | | | | | | | | 2020.06.23.165415v1.full. |
| | | | | | | | | | pdf + html) |
| | | | | | | SR1 | | N/A | Tingting Li et al., 2020 |
| | | | | | | | | | (https://www.biorxiv.org/ |
| | | | | | | | | | content/10.1101/ |
| | | | | | | | | | 2020.06.09.143438v1) |
| | | | | | | SR13 | | N/A | Tingting Li et al., 2020 |
| | | | | | | | | | (https://www.biorxiv.org/ |
| | | | | | | | | | content/10.1101/ |
| | | | | | | | | | 2020.06.09.143438v1) |
| | | | | | | SR18 | | N/A | Tingting Li et al., 2020 |
| | | | | | | | | | (https://www.biorxiv.org/ |
| | | | | | | | | | content/10.1101/ |
| | | | | | | | | | 2020.06.09.143438v1) |
| | | | | | | SR31 | | N/A | Tingting Li et al., 2020 |
| | | | | | | | | | (https://www.biorxiv.org/ |
| | | | | | | | | | content/10.1101/ |
| | | | | | | | | | 2020.06.09.143438v1) |
| | | | | | | SR34 | | N/A | Tingting Li et al., 2020 |
| | | | | | | | | | (https://www.biorxiv.org/ |
| | | | | | | | | | content/10.1101/ |
| | | | | | | | | | 2020.06.09.143438v1) |
| | | | | | | SR38 | | N/A | Tingting Li et al., 2020 |
| | | | | | | | | | (https://www.biorxiv.org/ |
| | | | | | | | | | content/10.1101/ |
| | | | | | | | | | 2020.06.09.143438v1) |
| | | | | | | SR4 | | N/A | Tingting Li et al., 2020 |
| | | | | | | | | | (https://www.biorxiv.org/ |
| | | | | | | | | | content/10.1101/ |
| | | | | | | | | | 2020.06.09.143438v1) |
| | | | | | | SR5 | | N/A | Tingting Li et al., 2020 |
| | | | | | | | | | (https://www.biorxiv.org/ |
| | | | | | | | | | content/10.1101/ |
| | | | | | | | | | 2020.06.09.143438v1) |
| | | | | | | SR7 | | N/A | Tingting Li et al., 2020 |
| | | | | | | | | | (https://www.biorxiv.org/ |
| | | | | | | | | | content/10.1101/ |
| | | | | | | | | | 2020.06.09.143438v1) |
| | | | | | | Ty1 | | N/A | Leo Hanke et al., 2020 |
| | | | | | | | | | (https://www.biorxiv.org/ |
| | | | | | | | | | content/10.1101/ |
| | | | | | | | | | 2020.06.02.130161V1) |
| | | | | | | VH-Fc- | | ND | Colton J. Bracken et al., |
| | | | | | | B01 | | | 2020 |
| | | | | | | | | | (https://www.biorxiv.org/ |
| | | | | | | | | | content/10.1101/ |
| | | | | | | | | | 2020.08.08.242511v1.full. |
| | | | | | | | | | pdf) |
| | | | | | | VH2-A01- | | ND | Colton J. Bracken et al., |
| | | | | | | B01 | | | 2020 |
| | | | | | | | | | (https://www.biorxiv.org/ |
| | | | | | | | | | content/10.1101/ |
| | | | | | | | | | 2020.08.08.242511v1.full. |
| | | | | | | | | | pdf) |
| | | | | | | VH2-A01- | | ND | Colton J. Bracken et al., |
| | | | | | | B02 | | | 2020 |
| | | | | | | | | | (https://www.biorxiv.org/ |
| | | | | | | | | | content/10.1101/ |
| | | | | | | | | | 2020.08.08.242511v1.full. |
| | | | | | | | | | pdf) |
| | | | | | | VH3-B01 | | ND | Colton J. Bracken et al., |
| | | | | | | | | | 2020 |
| | | | | | | | | | (https://www.biorxiv.org/ |
| | | | | | | | | | content/10.1101/ |
| | | | | | | | | | 2020.08.08.242511v1.full. |
| | | | | | | | | | pdf) |
| | | | | | | VHH-72 | | N/A | Daniel Wrapp et al., |
| | | | | | | | | | 2020 |
| | | | | | | | | | (https://www.sciencedirect. |
| | | | | | | | | | com/science/article/ |
| | | | | | | | | | pii/S0092867420304943) |
| | | | | | | W23UACh | | N/A | Guillermo Nieto et al., |
| | | | | | | | | | 2020 |
| | | | | | | | | | (https://www.biorxiv.org/ |
| | | | | | | | | | content/10.1101/ |
| | | | | | | | | | 2020.06.09.137935v1) |
| | | | | | | W25UACh | | N/A | Guillermo Nieto et al., |
| | | | | | | | | | 2020 |
| | | | | | | | | | (https://www.biorxiv.org/ |
| | | | | | | | | | content/10.1101/ |
| | | | | | | | | | 2020.06.09.137935v1) |

### EXAMPLES

[0284] The examples in this section are offered by way of illustration, and not by way of limitation.

### General Method: Plasmid Construction:

[0285] To construct single-gene expression plasmids, ORF (with Kosak and stop codon) of interested gene was used to simply replace existing gene at BstEII-BglII of BV2 vector (Kan resistant plasmid). For constructing multi-gene expression plasmids, the second ORF was inserted into expression-shuttle vector (Amp resistant plasmid) at BstEII-BglII. The expression cassette of resulting plasmid was then digested (RI-XbaI) and inserted into existing single expression plasmid at RI-NheI. This process yielded two expression cassette vectors with RI-NheI site available to another round of insertion.

### Example 1: Subcutaneous Injection of Plasmids in Mice with Successful Serum Expression

[0286] This Example describes subcutaneous injections of plasmids in mice with successful serum expression.

### Methods:

[0287] Three mice per group were injected subcutaneously (SC) with plasmid DNA encoding either an anti-CoV-2 mAb (experiment 375) or hGCSF (experiment 382). Mice were given subcutaneous injections in the interscapular region (scap) or shaved and given subcutaneous injections targeted to the 4^{th} and 5^{th} inguinal mammary fat pads (ing). DNA was suspended either in normal Lactated Ringer's or with hypertonic Ringer's (3%) (both without a particular carrier agent). Some mice were also given 1000 nmol DMPC neutral liposomes with the DNA, or low dose Chloroquine.

### Results:

[0288] Results of experiment 375 (anti-CoV-2 mAb) are shown in FIG. 1, showing serum levels of protein expression. A significant number of different mouse groups each received a different subcutaneous regimen as described in the methods as well as in FIG. 1. Mice 58 and 59 from experiment 375 each produced significant serum levels of an anti-SARS-CoV-2 neutralizing mAb 24 hours after subcutaneous injection. In contrast, none of the other subcutaneous injected mice produce detectable levels of this same mAb. Mice 58 and 59 produced detectable levels plasmid DNA encoded protein after subcutaneous injection. Furthermore, each of these two mice produced sufficiently high serum protein levels of the DNA therapeutic protein to produce a therapeutic anti-covid effect. It is noted that all the mice without significant expression had weights of between about 30 and 40 grams (considered non-overweight), while mice 58 and 59 had weights of between about 42 and 53 grams (considered grossly obese). It is believed that showing significant serum protein levels after plasmid injection subcutaneously in mice, without an expression aid of any type, is a fundamental, World changing achievement that may progressively replace all bio reactor produced recombinant proteins including monoclonal antibodies worldwide.

[0289] Results of experiment 382 (hGCSF) are shown in FIG. 2, showing serum levels of protein expression. A significant number of different mouse groups each received a different subcutaneous regimen as described in the methods as well as in FIG. 2. A variety of different mouse groups from experiment 382 each produced significant serum levels of the human G-CSF protein 24 hours after subcutaneous injection. These included mouse groups that received hG-CSF plasmid DNA alone (no added expression aids), hG-CSF plasmid DNA in hypertonic saline (3%) (no added expression aids), hG-CSF plasmid DNA mixed with low or high dose chloroquine hG-CSF plasmid, and/or DNA mixed with neutral MLV liposomes. Experiment 382 demonstrates that a variety of different subcutaneous injection approaches, including plasmid DNA alone or plasma DNA mixed with either chloroquine, hypertonic saline 5 or neutral MLV liposomes can each produce significant serum levels of the human G-CSF protein 24 hours after subcutaneous injection. Experiment 382 shows that a variety of different compositions containing either plasmid DNA alone or plasmid DNA with a variety of different drugs or diluents as well as with neutral MLV liposomes alone each produces significant serum levels of the plasmid DNA encoded protein product.

### Example 2: Subcutaneous Injection of Plasmids in Rats with Successful Serum Expression

[0290] This Example describes subcutaneous injections of plasmids in rats with successful serum expression.

### Methods:

[0291] On day 0, rats were given subcutaneous injection of plasmid DNA encoding anti-human IL-5 mAb (17 mg, left) or anti-IL5 mAb plus anti-a5J8 mAb (5 mg, right). On day 23, rats were both injected subcutaneously with 25 mg plasmid encoding anti-CoV-2 mAb 209K, one with hyaluronidase (right side of FIG. 3) and one without any expression aid (left side of FIG. 3). On day 36, both rats were injected subcutaneously with 20 mg plasmid DNA encoding anti-CD20 (rituximab).

### Results:

[0292] The results are shown in FIG. 3 and FIG. 6. Two different rat groups each received the same subcutaneous regimen as described in the methods as well as in FIG. 3 and FIG. 6. From day 44 on (day 267 was the most recent weekly blood draw), serum anti-human IgG levels of anti-CoV2 antibody were above one microgram per ml. These serum levels directly correlated with essentially 90 to 100 percent neutralization of the CoV-2 virus and for at least 127 days after a single subcutaneous injection. 127 days is the human equivalent of approximately 25 years. FIG. 6 further shows that the antibody level in serum peaked at about 115 days after administration and remained detectable for at least 267 days after initial administration.

[0293] This example shows two rats (#2 and #4) who produced detectable serum levels of plasmid DNA encoded protein following subcutaneous injection. Each of these two rats produced sufficiently high serum mAb protein levels of the plasmid DNA-encoded anti-CoV-2 mAb therapeutic protein to produce nearly 100% anti-CoV-2 neutralization. It is believed that showing significant serum protein levels after plasmid injection subcutaneously in rats, with and without an expression aid of any type, is an important achievement.

### Example 3: Subcutaneous Injection of Plasmids in Rats with Successful Serum Expression

[0294] This Example describes subcutaneous injections of plasmids in rats with successful serum expression with or without various pre-treatments.

### Methods:

[0295] Two rats (rats #1 and #2) were given IV pre-injections of liposomes composed of 4400 nmol DOTAP SUV with 2.5% dex palmitate and 2000 nmol DMPC MLV with 5% dex palmitate, followed by IV injection of 400 ug plasmid DNA encoding rituximab. This was followed by subcutaneous injection of 20 mg plasmid DNA encoding 5J8 in 3% hypertonic saline with hyaluronidase. The third rat (#3) was given 5 IP injection of an anti-CD20 antibody, followed by the same subcutaneous injection as the first two. Rat #4 was given IP injection of rituximab followed by the same subcutaneous injection as previous. Note that there is no cross-reactivity between the serum anti-human CD20 mAb ELISA and the serum anti-human 5J8 mAb used to measure serum levels of these two different mAbs

[0296] In addition, rats #5-8 were given subcutaneous injections only of the same liposomes as in rats 1 and 2, with the total divided into 7 injection sites. This was followed by subcutaneous injection of 20 mg plasmid DNA encoding 5J8. All subcutaneous injections were divided into 7 sites: the ₃rd 4th _{and 5}th mammary fat pads, and the interscapular region.

### Results:

[0297] The results are shown in FIG. 4 and FIG. 7. A total of eight different rat groups each received one of the eight different subcutaneous regimens as described in the methods and above. All the rat groups receiving plasmid DNA encoding either of the two different mAb proteins showed detectable mAb serum protein levels. These results further confirm the ability of rat administered subcutaneous plasmid DNA to produce significant ongoing DNA plasmid encoded serum proteins in injected rats. FIG. 7 further shows long-term expression of protein in serum, which remained detectable for at least 50 days.

### Example 4: Subcutaneous Injection of Plasmids in Rats with Successful Serum Expression, With and Without, Lipid Pre-Treatment

[0298] This Example describes subcutaneous injections of plasmids in rats with successful serum expression with or without Lipid pre-treatment.

### Methods:

[0299] Two rats per group were injected subcutaneously with 5, 15, 25, or 40 mg plasmid DNA encoding an anti-CoV2 antibody (without expression aid). Two rats were also injected with 25 mg the same DNA but after being given liposome injections of 4,400 nmol of pure DOTAP SUV mixed with 2.5% dex palmitate and 2000 nmol DMPC neutral MLV with 5% dex palmitate.

### Results:

[0300] The results are shown in FIG. 5 and FIG. 8. A total of five different rat groups of two each received one of five different subcutaneous DNA does regimens as described in the methods. All five rat groups receiving plasmid DNA encoding an anti-CoV-2 mAb protein showed detectable anti-CoV-2 mAb serum protein levels on days one and eight after subcutaneous injection. This includes not only the four groups receiving subcutaneous plasmid DNA alone but also the fifth group that received a sequential subcutaneous injection, of cationic SUV liposomes mixed with neutral MLV liposomes followed 30 seconds later by subcutaneous injection of plasmid DNA only. These experimental results demonstrate that sequential liposome then plasmid DNA injection produced significant serum levels of the plasmid DNA encoded protein at very early time points after injection. FIG. 8 further shows that the long-term expression of proteins in serum, which was detectable for at least 106 days.

### Example 5: In Vitro Transfection of Human Preadipocyte Primary Cells

[0301] This example describes in vitro transfection of human derived preadipocyte cells in culture with successful expression.

### Methods:

[0302] Preadiopcytes were grown and then plated for transfection at a concentration of 0.25×10⁵ cells per well in a 24-well plate. The cells were transfected with 1 or 5μg plasmid DNA encoding an anti-CoV-2 mAb complexed with either 2.7 μl Expifectamine (ThermoFisher)/μg DNA, 1.334 or 3.335 molar ratio of PEI/μg DNA, or 10, 20, or 30 nmol DOTAP/μg DNA. Thin-film transfections were performed by adding the DNA-lipid complexes to already plated cells, while direct transfections were performed by combining the DNA-lipid complexes with the cell suspension before adding to the cell culture plate. The media was collected every three days and assayed for hIgG levels.

### Results:

[0303] The results are shown in FIG. 9, showing protein expression levels. The best condition identified was the thin-film transfection with 1 μg DNA-2.7 μl Expifectamine which consistently showed the highest expression levels from day 1 to day 12. In contrast, the cells transfected with the different DNA-DOTAP ratios did not express from day 1 to day 12. The other expifectamine and PEI groups showed consistent low-level expression across the timeline. These results show that the preadipocyte cells were highly transfectable.

### Example 6: In Vitro Transfection of Human Preadipocyte Primary Cells in Various Stages of Differentiation into Mature Adipocytes

[0304] This example describes the in vitro transfection of the various stages of differentiation of human derived preadipocytes into fully mature adipocytes.

### Methods:

[0305] Human derived preadipocytes were differentiated into mature adipocytes over the course of 21 days. The cells were transfected every three days, starting with preadipocytes and ending with the mature adipocytes, with a plasmid DNA vector encoding an anti-CoV-2 mAb complexed with Expifectamine (ThermoFisher) at a ratio of 5 μg DNA:2.7 μl lipid. The media was changed every three days and assayed for hIgG levels.

### Results:

[0306] The results are shown in FIG. 10, showing protein expression levels following transfection of the various stages of preadipocyte differentiation into mature adipocytes. The most efficiently transfected stage was the preadipocytes as seen by the elevated expression levels of hIgG compared to the other stages of differentiating cells. The final mature adipocytes were the least transfectable as shown by the low levels of hIgG expression detected at day 3 (5 ng/ml) all the way up to day 21. There was reduced expression levels for stages 3, 4, and 5 compared to the preadipocyte group, but compared to the mature adipocytes the expression level was higher on days 3 and 6. These results show that targeting a mixed population of preadipocytes along with maturing adipocytes resulted in high levels of protein expression. Additionally, transfected preadipocytes maintained their expression levels as they mature into adipocytes.

### Example 7: In Vitro Transfection of Mature Human Adipocytes.

[0307] This example describes the in vitro transfection of matures human adipocytes.

### Methods:

[0308] Human derived preadipocytes were differentiated into mature adipocytes for 21 days before they were transfected with a plasmid DNA vector encoding an anti-CoV-2 mAb complexed with either 0.54 μl Expifectamine (ThermoFisher)/μg DNA, 1.334 molar ratio of PEI/μg DNA, or 2 nmol DOTAP/μg DNA. Transfections were done by either thin-film or direct transfection. Thin-film transfections were performed by adding the DNA-lipid complexes to already plated adipocytes, while direct transfections were performed by combining the DNA-lipid complexes and pipetting the mixture up and down in the well with the attached adipocytes to generate a single cell suspension. The media was collected every two days and assayed for hIgG levels.

### Results:

[0309] The results are shown in FIG. 11. The highest expression levels were seen in the thin-film PEI group transfected with 1 μg of plasmid DNA and a 1.334 molar ratio of PEI. Overall expression in the adipocytes took at least one week to start increasing in every group tested. The DOTAP groups were the least successful for each method and DNA-lipid ratio tested. The Expifectamine treated groups with the highest expression at day 18 were those transfected with the direct transfection method (both 1 and 5 μg plasmid DNA), while the other expifectamine thin-film groups did not express as highly. These results show that mature human adipocytes expressed the anti-CoV-2 mAb following transfection. The expression was both delayed and reduced compared to the predipocytes in previous examples.

### Example 8: Use of Obese Mice for Subcutaneous Injection

### Methods:

[0310] Three obsess mice (ob-/ob- or B6.Cg-Lepob/J strain) per group were injected subcutaneously with 800, 1600, or 3200 μg of a plasmid encoding hGH and hGCSF in Lactated Ringer's solution. Obese mice that received injections of lactated Ringer's solution (blank) were included as the negative control.

[0311] Blood samples were taken on both 1 day and 15 days post injection from the mice injected with the plasmid and control group, and the expression level of hGH and hGCSF were assessed by ELISA. Additionally, whole blood samples collected from the Day 15 bleeds were submitted for a complete blood count to assess absolute neutrophil count (ANC).

### Results:

[0312] The obese mice, while having larger fat deposits in both visceral and subcutaneous fat compartments, did not express hGH and hGCSF faster or at higher levels as compared to the control group. The hGH and hGCSF ELISAs returned values that were indistinguishable from background (data not shown). The ANC count using Day 15 bleeds also did not differ between un-injected mice and subcutaneously injected mice (FIG. 12).

### Example 9: Injection of hGLA in 1 mL Volume

### Methods:

[0313] A total of 18 mice were group into 6 groups of three mice per group. The groups of three mice were each injected subcutaneously with 300, 900, 1800, or 3200 μg of a plasmid encoding hGLA-1×L-hyFc in 1 mL of Lactated Ringer's solution or 1 mL of hypotonic (.5%) Ringer's solution. The total 1 mL Volume was divided into 200 uL per inguinal fat pad and 600 uL into the subscapular region for each injected mice. Mice were bled at day 1 and then every 7 or 14 days thereafter and hGLA expression level assessed by ELISA.

### Results:

[0314] The results are shown in FIG. 13. Using the 1 mL volume, 2 of the 18 mice still expressed significant levels of hGLA at day 119.

### Example 10: Injection of hGLA in Smaller Volumes

### Methods:

[0315] Mice were treated with antibodies against CD4 and B220 to deplete B and T cell populations. A first group of five mice were injected subcutaneously with 800 μg of a plasmid encoding hGLA-1×L-hyFc in 800 μL Lactated Ringer's solution. A second group of five mice were injected subcutaneously with 800 μg of a plasmid encoding hGLA-1×L-hyFc in 200 μL Lactated Ringer's solution. A third group of five mice were injected subcutaneously with 1600 μg of a plasmid encoding hGLA-1×L-hyFc in 800 μL Lactated Ringer's solution. A fourth group of five mice were injected subcutaneously with 1600 μg of a plasmid encoding hGLA-1×L-hyFc in 400 μL Lactated Ringer's solution. A fifth group of five mice were injected subcutaneously with 3200 μg of a plasmid encoding hGLA-1×L-hyFc in 800 μL Lactated Ringer's solution. A final sixth group of five mice were injected with 1600 μg plasmid in 800 μL hypotonic (0.5%) Ringer's solution. The groups of mice were bled at day 1 and then every 7 or 14 days thereafter and hGLA expression level assessed by ELISA.

### Results:

[0316] The results are shown in FIG. 14. The results indicate that 800 μg of hGLA plasmid injected one time was sufficient to produce protein expression well above the minimal therapeutic level (dotted line), starting between 22 and 28 days after injection. Smaller volumes of the same dose (group 4 vs group 1 and group 5 vs group 2) yielded higher expression. This high level of expression was maintained at least 119 days after injection.

### Example 11: Expression of Factor VIII or IX Related to Hemophilia

### Methods:

[0317] Five mice per group were treated with antibodies against CD4 and B220 to deplete B and T cell populations. Mice were injected subcutaneously with 400, 800, or 1600 μg of a plasmid encoding Factor IX in 800 μL (standard) or 1 mL (higher volume) volumes of Lactated Ringer's solution. Mice were bled at day 1 and then every 7 days thereafter and Factor IX expression level assessed by ELISA.

### Results:

[0318] The results are shown in FIG. 15. The results indicate that Factor IX did not express when injected using the standard subcutaneous plasmid delivery that generated hGLA expression.

### Example 12: Expression of Antibody Against SARS-Cov-2 by Inguinal Injection

### Methods:

[0319] Three mice per group were injected subcutaneously with 400, 800,1600, or 3200 μg of a plasmid encoding an anti-CoV2 antibody in 100, 200, 400, or 800 μL volumes of Lactated Ringer's solution. In the final group, the volume was divided into 6 smaller injections distributed along the length of the inguinal fat pad. Mice were bled at day 1 and then every 7 or 14 days thereafter and protein expression level assessed by ELISA.

### Results:

[0320] The results are shown in FIG. 16. The results indicate that anti-CoV2 antibody expressed at a low level in mice injected subcutaneously with at least 800 μg plasmid. Smaller volumes of the same dose of plasmid expressed at a slightly higher level.

[0321] Furthermore, to investigate whether the body weight of an individual mouse correlates with the expression level of the anti-CoV2 antibody in the mouse, measured expression levels of the SARS-CoV-2 antibody were plotted against body weights of test animal in FIG. 33. As shown in the figure, no clear correlation between expression level and mice weight was observed. These data demonstrate that long-term expression of the encoded protein using the present method does not require the subject to have obesity or have certain amount of body fat.

### Example 13: Mammary Fat Pad Implantation of Plasmid Encoding Anti-CoV2 Antibody

### Methods:

[0322] Three mice per group were administered with 800 μg of a plasmid encoding an anti-CoV2 antibody in 100, 200, or 400 μL volumes of Lactated Ringer's solution. Administration were made after mice were shaved and an ˜1 cm incision was made over the inguinal region to expose the fat pad and the fat pad was teased out with forceps. After injection, mice were closed with wound clips. Mice were bled at day 1 and then every 7 or 14 days thereafter and protein expression level assessed by ELISA.

### Results:

[0323] The results are shown in FIG. 18. The results indicate that anti-CoV2 antibodies expressed at a low level in mice given 800 μg plasmid via incision surgery. Mice given 100 and 200 μL volume expressed similarly to the mice given the same volumes via regular subcutaneous injection. Mice given 400 μL via incision surgery did not express significant levels of protein. Overall, less injection volume resulted in higher protein expression.

### Example 14: Expression of Anti-CoV2 Antibodies in Mice Previously Injected with Factor IX Plasmid

### Methods:

[0324] Mice that were previously injected with Factor IX were used for reinjection. Three mice per group were injected subcutaneously with 400, 800, or 1600 μg of a plasmid encoding the anti-CoV2 antibody in indicated volumes of Lactated Ringer's solution. Mice were bled at day 1 and then every 7 or 14 days thereafter and protein expression level assessed by ELISA.

### Results:

[0325] The results are shown in FIG. 19. The results indicate that anti-CoV2 antibodies did not express to appreciable levels in mice previously injected subcutaneously with a different plasmid that did not yield high expression.

### Example 15: Expression of hGLA at Various Plasmid Concentrations and Hyaluronidase Conditions

### Methods:

[0326] Three mice per group were treated with antibodies against CD4 and B220 to deplete B and T cell populations. Mice were injected subcutaneously with 800 μg of a plasmid encoding hGLA-1×L-hyFc in indicated volumes of Lactated Ringer's solution. The final group was injected with 60 Units of hyaluronidase per animal. Mice were bled at day 1 and then every 7 days thereafter and hGLA expression level assessed by ELISA.

### Results:

[0327] The results are shown in FIG. 20. The results indicate that 800 μg of hGLA plasmid injected one time was sufficient to produce protein expression well above the minimal therapeutic level (dotted line), starting roughly 22 days after injection, and that the group given higher dosage of hyaluronidase reached higher levels of expression faster.

[0328] Furthermore, to investigate whether the body weight of an individual mouse correlates with the hGLA expression level in the mouse, measured expression levels of hGLA were plotted against body weights of test animal in FIG. 34. As shown in the figure, no clear correlation between expression level and mice body weight was observed. These data demonstrate that long-term expression of the encoded protein using the present method does not require the subject to have obesity or have certain amount of body fat.

### Example 16

[0329] This example describes in vitro transfection of primary mouse preadipocytes cells and subsequent transplantation into mouse.

### Methods:

[0330] Two to three-week old C57BL/6 J female mice is euthanized and inguinal fat tissue is harvested and placed in HBSS buffer containing 3% (w/v) bovine serum albumin (BSA). Cells are incubated in 2 mg/mL collagenase in HBSS BSA 3% (w/v) for 30 min to digest the tissue. Cells are cultured to 80% confluence in DMEM/F12 cell culture media containing 1% Penicillin/streptomycin, 10% Fetal bovine serum, 100 μg/mL Normocin. The Preadiopcytes are then grown and plated for transfection at a concentration of 2×10⁶ cells per mL in a cell culture flask. The cells are transfected with 5 μg plasmid DNA comprising the sequence of GLA gene that encodes alpha-galactosidase A. The plasmid is complexed with 2.7 μl of Expifectamine (ThermoFisher)/μg DNA before being added to the cells. The cells are transfected overnight in an incubator. The cells are then collected, washed twice with 1× PBS, counted on a cell counter and pelleted. Each cell pellets contains about 10×10⁶ live cells and are kept on ice until implantation. Each pellet was mixed with matrigel up for a total volume of 400 μL on ice and the cell and matrigel suspension was slowly drawn into a 1 mL syringe, which is then slowly injected into three mice by tenting the subcutaneous subscapular area. Mice serum is collected every 3 days to measure the expression level of alpha-galactosidase A. The weight of mice is also monitored.

### Results:

[0331] Elevated expression of alpha-galactosidase A is detected in mouse serum and remains detectable over a course of 3 months. The mice remain healthy during the observation period.

### Example 17: Inclusion of Dexamethasone or TGF-β3 to Improve Expression of hGLA After Subcutaneous Injection

### Methods:

[0332] Groups of three mice were injected intraperitoneally or subcutaneously with 20 mg/kg body weight (high) or 2 mg/kg body weight (low) water-soluble dexamethasone along with monoclonal antibodies (mABs) to deplete B or T cells. One additional group of three mice were injected intraperitoneally with 50 or 200 ng human TGF-β3 along with mAbs to deplete B and T cells. Two groups of mice (control) were injected intraperitoneally with only depletion mAbs. 30 minutes subsequently, all mice were injected subcutaneously with 800 ug plasmid DNA encoding hGLA-1×L-hyFc in 200 uL Lactated Ringer's, along with 60U/animal hyaluronidase. Mice were bled on the 5^{th} days after injection and serum samples were collected and evaluated by ELISA.

### Results:

[0333] The results are shown in FIG. 22. The higher dexamethasone group performed similarly to the control group. Mice receiving intraperitoneal injection or subcutaneous injection of the low dose of dexamethasone, as well as mice receiving the higher TGF-beta3 dose performed better than the DNA and hyaluronidase alone control group.

### Example 18: Vectors Encoding Human GLA (hGLA-hyFc) Fusion Proteins

### Methods:

[0334] Groups of three mice are intraperitoneally injected with mAbs to deplete B and T Cells. The mice are subsequently injected subcutaneously once with plasmid DNAs encoding hGLA-hyFc (SEQ ID NO:49), hGLA-1×L-hyFc (SEQ ID NO:50), hGLA-2×L-hyFc (SEQ ID NO:51), and hGLA-3×L-hyFc (SEQ ID NO:52), respectively. Particularly, the 1×L linker has the sequence of GGGGS (SEQ ID NO:53), the 2×L linker has the sequence of GGGGSGGGGS (SEQ ID NO:54), and the 3×L linker has the sequence of GGGGSGGGGSGGGGS (SEQ ID NO:55). Each plasmid is mixed with 60U/ms hyaluronidase in 200 uL Lactated Ringer's before injection. Each plasmid is administered at three tested doses (400 ug/mouse, 800 ug/mouse, and 1600 ug/mouse) to three groups of mice, respectively. The following day and every week thereafter for 8 weeks, mice are bled into serum separator tubes. Resulting serum is tested for expression of hGLA protein by ELISA assay.

### Results:

[0335] For each plasmid, following the subcutaneous injection at the various doses, the tested subjects show injection-dose-dependent expressions of the encoded GLA fusion protein, with the lowest tested dose (400 ug/mouse) sufficient to produce stable expression of the encoded protein at a therapeutic level in the subject's blood. Higher dosage injection results in a higher expression level.

[0336] All publications and patents mentioned in the present application are herein incorporated by reference. Various modification and variation of the described methods and compositions of the invention will be apparent to those skilled in the art without departing from the scope and spirit of the invention. Although the invention has been described in connection with specific preferred embodiments, it should be understood that the invention as claimed should not be unduly limited to such specific embodiments. Indeed, various modifications of the described modes for carrying out the invention that are obvious to those skilled in the relevant fields are intended to be within the scope of the following claims.

What is claimed is:

1. A method comprising: treating a subject, and/or said subject's subcutaneous pre-adipocytes and/or adipocytes, with a composition,
wherein said composition comprises, or consists essentially of, a nucleic acid sequence, or a vector containing said nucleic acid sequence, wherein said nucleic acid sequence encodes at least one protein or at least one biologically active nucleic acid molecule, and
wherein said treating comprises at least one of the following:
a) injecting said composition into one or more subcutaneous regions of said subject such that said at least one protein, or said at least one biologically active nucleic acid molecule, is detectable in a blood, serum, or plasma sample from said subject; and/or
b) injecting said composition into one or more subcutaneous regions of said subject such that a plurality of in-vivo transfected pre-adipocytes and/or adipocytes are generated in said subcutaneous region;
c) performing the following:
i) contacting a plurality said pre-adipocytes and/or adipocytes from said subject ex-vivo with said composition such that a plurality of ex-vivo transfected pre-adipocytes and/or adipocytes are generated, and
ii) injecting at least some of said plurality of ex-vivo transfected pre-adipocytes and/or adipocytes into one or more subcutaneous regions of said subject; and/or
d) implanting a solid medium carrying said composition into the one or more subcutaneous regions.

2. The method of claim 1, wherein said plurality of in-vivo transfected pre-adipocytes and/or adipocytes and/or said ex-vivo transfected pre-adipocytes and/or adipocytes are enlarged such that, on average, they contain at least 60 μg of lipid.

3. The method of claim 1, wherein said plurality of in-vivo transfected pre-adipocytes and/or adipocytes and/or said ex-vivo transfected pre-adipocytes and/or adipocytes are enlarged such that, on average, they contain at least 80 ug of lipid.

4. The method of claim 1, wherein said plurality of in-vivo transfected pre-adipocytes and/or adipocytes and/or said ex-vivo transfected pre-adipocytes and/or adipocytes are enlarged such that, on average, they have a diameter of at least 70 μm.

5. The method of claim 1, wherein said plurality of in-vivo transfected pre-adipocytes and/or adipocytes and/or said ex-vivo transfected pre-adipocytes and/or adipocytes are enlarged such that, on average, they have a diameter of at least 90 μm.

6. The method of claim 1, wherein said composition is free of any reagents that serve as aids to transfection.

7. The method of claim 1, wherein said composition comprises chloroquine, hyaluronidase, neutral liposomes, cationic liposomes, hypertonic saline, Ringer's solution, Lactated Ringer's solution, hypertonic Ringer's solution, hypotonic saline, hypotonic Ringers, hypotonic dextrose, pure water, or any combination thereof.

8. The method of claim 1, wherein said subject is overweight by BMI standards and/or is clinically obese, or wherein said subject is not overweight by BMI standards and/or is clinically obese.

9. The method of claim 1, wherein said injecting in a), b), or c) ii) is into a fat pad of said subject.

10. The method of claim 1, wherein said at least one protein comprises an antibody variable region.

11. The method of claim 10, wherein said antibody variable region is a light chain or heavy chain variable region.

12. The method of claim 1, wherein said at least one protein comprises a least a portion of an antibody light chain and at least a portion of an antibody heavy chain.

13. The method of claim 1, wherein said at least one protein comprises an antibody light chain and an antibody heavy chain, wherein said light and heavy chains together form a monoclonal antibody or antigen binding fragment thereof.

14. The method of claim 13, wherein said monoclonal antibody, or antigen binding portion thereof, are specific for SARS-CoV-2 or influenza.

15. The method of claim 13, wherein said monoclonal antibody, or antigen binding portion thereof, is selected from those listed in Table 4.

16. The method of claim 13, wherein said subject is infected with a pathogen, and wherein said monoclonal antibody, or antigen binding portion thereof, is expressed in said blood, serum, or plasma at pathogen-neutralizing levels.

17. The method of claim 1, further comprising, prior to said injecting in a), b), or c) ii), administering a solution comprising cationic liposomes and/or neutral liposomes to said subject.

18. The method of claim 17, wherein said solution comprises dexamethasone and/or dexamethasone palmitate.

19. The method of claim 17, wherein said administering said cationic and/or neutral liposomes is performed intravenously or subcutaneously.

20. The method of claim 1, wherein said injecting in a), b), or c) ii) is performed at a plurality of sites in said subject.

21. The method of claim 1, wherein said injecting in a) and/or b) causes said subject to receive between 1 and 60 micrograms, or between 0.00001 and 1.0 micrograms, per microliter of said composition of said nucleic acid sequence, or said vector containing said nucleic acid sequence.

22. The method of claim 1, wherein said vector comprises a non-viral vector, optionally wherein the vector further comprises one or more DNA expression cassettes; optionally wherein said vector is a plasmid.

23. The method of claim 1, wherein said nucleic acid sequence comprises DNA.

24. The method of claim 1, wherein said nucleic acid comprises mRNA, and wherein said mRNA is optionally capped and composed of at least some modified bases that reduce immunogenicity.

25. The method of claim 1, wherein said subject is a human.

26. The method of claim 1, wherein said at least one biologically active nucleic acid molecule comprises a sequence selected from: an siRNA, shRNA sequence, a miRNA sequence, an antisense sequence, a CRISPR single guide RNA sequence (sgRNA), piRNA, snoRNA, tsRNA, and srRNA.

27. The method of claim 1, wherein said nucleic acid sequence or vector are CPG-free or CPG-reduced.

28. The method of claim 1, wherein said at least one protein is selected from the group consisting of:
human growth hormone, G-CSF protein, erythropoietin, Etanercept, Bevacizumab, Rituximab, Adalimumab, Infliximab, Trastuzumab, Insulin, Insulin glargine, Epoetin alfa, Pegfilgrastim, Ranibizumab, Darbepoetin alfa, Interferon beta-1a, Interferon beta-1a (Rebif), Insulin aspart, Rhu insulin, Octocog alfa, Insulin lispro, Cetuximab, Peginterferon alfa-2a, Interferon beta-1b, Eptacog alfa, Insulin aspart, OnabotulinumtoxinA, Epoetin beta, Rec antihemophilic factor, Filgrastin, Insulin detemir, Natalizumab, Insulin (humulin), ACE2, Palivizumab, and a-galactosidase A (GLA).

29. The method of claim 1, wherein said at least one protein and/or said at least one biologically active nucleic acid, is expressed in said subject at a level of at least 50 μg/ml or at least 100 ng/ml, in blood, serum, or plasma, for at least 10 days, or at least 25 days.

30. The method of claim 1, wherein said at least one protein and/or said at least one biologically active nucleic acid, is expressed in said subject at a level of at least 1000 ng/ml, in blood, serum, or plasma, for at least 10 days, or at least 25 days or at least 114 days after subcutaneous injection.

31. The method of claim 29, wherein said expression level is maintained in said subject for at least one month without any further treatment.

32. The method of claim 17, wherein said cationic and neutral lipids are selected from the group consisting of: DOTAP (1,2-dioleoyl-3-trimethylammonium-propane); distearoyl phosphatidyl choline (DSPC); hydrogenated or non-hydrogenated soya phosphatidylcholine (HSPC); distearoylphosphatidylethanolamine (DSPE); egg phosphatidylcholine (EPC); 1,2-Distearoyl-sn-glycero-3-phospho-rac-glycerol (DSPG); dimyristoyl phosphatidylcholine (DMPC); 1,2-Dimyristoyl-sn-glycero-3-phosphoglycerol (DMPG); 1,2-Dipalmitoyl-sn-glycero-3-phosphate (DPPA); trimethylammonium propane lipids; DOTIM (1-[2-9(2)-octadecenoylloxy)ethyl]-2-(8(2)-heptadecenyl)-3-(2-hydroxyethyl) midizolinium chloride) lipids; and mixtures of two or more thereof.

33. The method of claim 1, wherein said one or more non-viral expression vectors comprise plasmids, wherein said plasmids are not attached to, or encapsulated in, any delivery agent.

34. The method of claim 1, wherein said at least one protein comprises at least one anti-SARS-CoV-2 monoclonal antibody, or antigen-binding portion thereof, and is optionally selected from the group consisting of: VIR-7831; LY-CoV1404; LY3853113; Zost 2355K; CV07-209K; C121L; Zost 2504L; CV38-183L; COVA215K; RBD215; CV07-250L; C144L; COVA118L; C135K; and B38.

35. The method of claim 34, wherein said at least one anti-SARS-CoV-2 antibody, or antigen-binding portion thereof, comprises at least two anti-SARS-CoV-2 antibodies, and/or antigen-binding portions thereof, which are expressed in said subject at an expression level sufficient to reduce: i) the SARS-CoV-2 viral load in said subject, and/or ii) at least one symptom in said subject caused by said SARS-CoV-2 infection.

36. The method of claim 34, wherein said at least one anti-SARS-CoV-2 antibody, or antigen-binding portion thereof, comprises at least four, or at least eight, or at least 11, anti-SARS-CoV-2 antibodies and/or antigen-binding portions thereof.

37. The method of claim 1, wherein, prior to said injecting, said subject is treated with dexamethasone fatty acid ester.

38. The method of claim 1, wherein said composition further comprise a physiologically tolerable buffer or intravenous solution.

39. The method of claim 1, wherein prior to said injecting, the method further comprises administering a solution to said subject comprising liposomes comprising said polycationic structures, wherein said liposomes further comprising one or more macrophage targeting moieties selected from the group consisting of: mannose moieties, maleimide moieties, a folate receptor ligand, folate, folate receptor antibody or fragment thereof, formyl peptide receptor ligands, N-formyl-Met-Leu-Phe, tetrapeptide Thr-Lys-Pro-Arg, galactose, lactobionic acid, a lipid bi-layer integrating peptide and/or a target peptide.

40. The method of claim 1, wherein 0.05-60 mg/mL of said vectors are present in said composition.

41. The method of claim 1, wherein in d) the implanting a is performed via an incision surgery.

42. The method of claim 1, further comprising, prior to said injecting in a), b), or c) ii) or said implanting in d), administering a composition comprising TGF-β3 to said subject, optionally wherein the composition comprising TGF-β3 is administered intravenously.

43. The method of claim 1, wherein prior to said injecting, said subject is treated with TGF-133.

44. A system comprising:
a) a plurality of transfected and enlarged adipocytes or pre-adipocytes, wherein each of said plurality of transfected and enlarged adipocytes or pre-adipocytes comprises an exogenous nucleic acid sequence, or a vector containing said nucleic acid sequence, wherein said nucleic acid sequence encodes at least one protein or at least one biologically active nucleic acid molecule, and
b) a first container, wherein said plurality of transfected and enlarged adipocytes or pre-adipocytes are present in said first container.

45. The system of claim 44, wherein said first container comprises a syringe configured for injecting said plurality of transfected and enlarged adipocytes or pre-adipocytes into a subject subcutaneously.

46. The system of claim 44, further comprising: c) a solution comprising at least one of the following: i) cationic liposomes, ii) neutral liposomes, iii) dexamethasone, and iv) dexamethasone palmitate.

47. The system of claim 44, wherein the plurality transfected and enlarged adipocytes or pre-adipocytes contain, on average, at least 60 pg of lipid.

48. The system of claim 44, wherein the plurality transfected and enlarged adipocytes or pre-adipocytes contain, on average, at least 80 pg of lipid.

49. The system of claim 44, wherein said transfected and enlarged adipocytes or pre-adipocytes have, on average, a diameter of at least 70 μm.

50. The system of claim 44, wherein said transfected and enlarged adipocytes or pre-adipocytes have, on average, a diameter of at least 90 μm.

51. The system of claim 44, wherein said transfected and enlarged adipocytes or pre-adipocytes are derived from one or more subcutaneous regions of a subject.

The application's sequence listing, which the Patent Office published only in electronic form, follows.

SEQUENCE LISTING (4300 sequences)

SEQ ID NO: 1 - protein, 7 aa, Simian vacuolating virus 40
PKKKRKV

SEQ ID NO: 2 - protein, 13 aa, Herpes simplex virus
IDMLIDLGLDLSD

SEQ ID NO: 3 - protein, 29 aa, Ovis aries
MMSFVSLLLVGILFWATEAEQLTKCEVFQ

SEQ ID NO: 4 - protein, 4 aa, synthetic construct
KDEL

SEQ ID NO: 5 - protein, 25 aa, Saccharomyces cerevisiae
MLSLRQSIRFFKPATRTLCSSRYLL

SEQ ID NO: 6 - protein, 39 aa, Pisum sativum
MVAMAMASLQSSMSSLSLSSNSFLGQPLSPITLSPFLQG

SEQ ID NO: 7 - protein, 7 aa, synthetic construct
  VARIANT 1: note = X is S or T
  VARIANT 4: note = X is any naturally occurring amino acid
XRRXFLK

SEQ ID NO: 8 - skipped

SEQ ID NO: 9 - protein, 13 aa, synthetic construct
  VARIANT 1..4: note = X is any naturally occurring amino acid
  VARIANT 7..11: note = X is any naturally occurring amino acid
XXXXRLXXXXXHL

SEQ ID NO: 10 - DNA, 1206 bp, synthetic construct
  source 1..1206: mol_type = other DNA
cactatgtggacatgaattctcatagctagctctagtgatcagcagttcaacctgttgatagtatgtactaagctctcatgtttaatgtactaagctctcatgtttaatgaactaaaccctcatggctaatgtactaagctctcatggctaatgtactaagctctcatgtttcatgtactaagctctcatgtttgaacaataaaattaatataaatcagcaacttaaatagcctctaaggttttaagttttataagaaaaaaaagaatatataaggcttttaaaggttttaaggtttcctaggttatcctcatatgagctcttagaaaaactcatccagcatcaaatgaaactgcaatttattcatatcaggattatcaataccatatttttgaaaaagtcttttctgtaatgaaggagaaaactcacccaggcagttccataggatggcaagatcctggtatctgtctgcaattccaactcttccaacatcaatacaacctattaatttcccctcatcaaaaataaggttatcaagtgagaaatcaccatgagtgaccactgaatctggtgagaatggcaaaagattatgcatttctttccagacttgttcaacaggccagccatttctctcatcatcaaaatcactggcatcaaccaaaccattattcattcttgattgggcctgagccagtctaaatactctatcagagttaaaaggacaattacaaacaggaatggaatgcaatcttctcaggaacactgccagggcatcaacaatattttcacctgaatcaggatattcttccaatacctggaatgctgttttccctgggatggcagtggtgagtaaccatgcatcatcaggagttctgataaaatgcttgatggttggaagaggcataaattcagtcagccagtttagtctgaccatctcatctgtaacatcattggcaacagaacctttgccatgtttcagaaacaactctggggcatctggcttcccatacaatctatagattgtggcacctgattgcccaacattatctctagcccatttatacccatataaatcagcatccatgttggaatttaatcttggcctggagcaagaggtttctctttgaatatggctcatacatgtgcacctcctatagtgagttgtattatactatgcagatatactatgccaatgtttaattgtcag

SEQ ID NO: 11 - DNA, 5596 bp, synthetic construct
  source 1..5596: mol_type = other DNA
gaattctcatagctagcatgagtcaatgggaaaaacccattggagccaagtacactgactcaatagggactttccattgggttttgcccagtacataaggtcaatagggggtgagtcaacaggaaagtcccattggagccaagtacattgagtcaatagggactttccaatgggttttgcccagtacataaggtcaatgggaggtaagccaatgggtttttcccattactgacatgtatactgagtcattagggactttccaatgggttttgcccagtacataaggtcaataggggtgaatcaacaggaaagtcccattggagccaagtacactgagtcaatagggactttccattgggttttgcccagtacaaaaggtcaatagggggtgagtcaatgggtttttcccattattggcacatacataaggtcaataggggtgactagtggagaagagcatgcttgagggctgagtgcccctcagtgggcagagagcacatggcccacagtccctgagaagttggggggaggggtgggcaattgaactggtgcctagagaaggtggggcttgggtaaactgggaaagtgatgtggtgtactggctccacctttttccccagggtgggggagaaccatatataagtgcagtagtctctgtgaacattcaagcttctgccttctccctcctgtgagtttggtaagtcactgactgtctatgcctgggaaagggtgggcaggagatggggcagtgcaggaaaagtggcactatgaaccctgcagccctagacaattgtactaaccttcttctctttcctctcctgacaggttggtaaccaagccaccatgcagctgagaaaccctgagctgcacctgggctgtgctctggccctgagatttctggctctggtgtcctgggacatccctggtgctagagccctggataatggcctggccagaacacctacaatgggctggctgcactgggagagattcatgtgcaacctggactgccaagaggaacctgacagctgcatctctgagaagctgttcatggaaatggctgagctgatggtgtctgaaggctggaaggatgctggctatgagtacctgtgcattgatgactgctggatggcccctcagagagactctgaaggcagactccaggctgaccctcagaggttccctcatggcatcagacagctggccaactatgtgcacagcaagggcctgaagctgggcatctatgctgatgtgggcaacaagacctgtgctggcttccctggcagctttggctactatgacattgatgcccagacctttgctgactggggagttgacctgctgaagtttgatggctgctactgtgacagcctggaaaacctggctgatggctacaagcacatgagcctggctctgaacagaacaggcagatccattgtgtacagctgtgaatggcccctgtacatgtggcccttccagaagcctaactacacagagatcagacagtactgcaaccattggaggaactttgctgatattgatgatagctggaagtccatcaagagcatcctggactggaccagcttcaatcaagaaaggattgtggatgtggctggccctggtggctggaatgaccctgacatgctggtcattggcaactttggcctgagctggaaccagcaagtgacccagatggccctgtgggccattatggctgcccctctgttcatgagcaatgacctgagacacatcagccctcaggctaaggccctgctccaggacaaggatgtgattgctatcaatcaggaccctctgggcaagcagggctaccagcttagacagggagacaactttgaagtgtgggaaagacccctgtctggcctggcttgggctgttgccatgatcaacagacaagagattggaggccccaggtcctacaccattgctgtggccagccttggcaaaggggttgcctgtaatcctgcctgcttcatcacccagctgctgcctgtgaagagaaagctgggcttttatgagtggaccagcagactgagaagccacatcaaccccacaggcacagtgctgctgcaactggaaaacacaatgcagatgtccctgaaggacctgctgggtggaggaggtagtagaaacacaggcagaggtggagaggaaaagaagaaagagaaagaaaaagaggaacaagaggaaagggaaactaagacccctgagtgccccagccacacacagcctctgggagtgttcctgtttcctccaaagccaaaggacaccctgatgatcagcagaacccctgaagtgacctgtgtggtggtggatgtgtcccaagaggacccagaggtgcagttcaattggtatgtggatggtgttgaggtgcacaatgccaagaccaagcctagagaggaacagttcaacagcacctacagagtggtgtctgtgctgacagtgctgcaccaggactggctgaatggcaaagagtacaagtgcaaggtgtccaacaagggcctgcctagcagcattgaaaagaccatcagcaaggccaagggccagccaagagaaccccaggtgtacacactgcctccaagccaagaagagatgaccaagaaccaggtgtccctgacctgcctggtcaagggcttctacccctctgacattgctgtggaatgggagagcaatggccagcctgagaacaactacaagaccacacctcctgtgctggactctgatggctcattcttcctgtacagcagactgacagtggacaagagcagatggcaagagggcaatgtgttcagctgctctgtgatgcatgaggccctgcacaaccactacacccagaagtctctgagcctgagcctgggcaaatgaagatctacttctggctaataaaagatcagagctctagtgatctgtgtgttggttttttgtgtctgcattctagatactaagcttggcgtaatcatggtcatagctgtttcctgtgtgaaattgttatccgctcacaattccacacaacatacgagccggaagcataaagtgtaaagcctggggtgcctaatgagtgagctaactcacattaattgcgttgcgctcactgcccgctttccagtcgggaaacctgtcgtgccagctgcattaatgaatcggccaacgcgcggggagaggcggtttgcgtattgggcgctcttccgcttcctcgctcactgactcgctgcgctcggtcgttcggctgcggcgagcggtatcagctcactcaaaggcggtaatacggttatccacagaatcaggggataacgcaggaaagaacatgtgagcaaaaggccagcaaaaggccaggaaccgtaaaaaggccgcgttgctggcgtttttccataggctccgcccccctgacgagcatcacaaaaatcgacgctcaagtcagaggtggcgaaacccgacaggactataaagataccaggcgtttccccctggaagctccctcgtgcgctctcctgttccgaccctgccgcttaccggatacctgtccgcctttctcccttcgggaagcgtggcgctttctcatagctcacgctgtaggtatctcagttcggtgtaggtcgttcgctccaagctgggctgtgtgcacgaaccccccgttcagcccgaccgctgcgccttatccggtaactatcgtcttgagtccaacccggtaagacacgacttatcgccactggcagcagccactggtaacaggattagcagagcgaggtatgtaggcggtgctacagagttcttgaagtggtggcctaactacggctacactagaagaacagtatttggtatctgcgctctgctgaagccagttaccttcggaaaaagagttggtagctcttgatccggcaaacaaaccaccgctggtagcggtggtttttttgtttgcaagcagcagattacgcgcagaaaaaaaggatctcaagaagatcctttgatcttttctacggggtctgacgctcagtggaacgaaaactcacgttaagggattttggtcatgagattatcaaaaaggatcttcacctagatccttttaaattaaaaatgaagttttaaatcaatctaaagtatatatgagtaaacttggtctgacagttaccaatgcttaatcagtgaggcacctatctcagcgatctgtctatttcgttcatccatagttgcctgactccccgtcgtgtagataactacgatacgggagggcttaccatctggccccagtgctgcaatgataccgcgagacccacgctcaccggctccagatttatcagcaataaaccagccagccggaagggccgagcgcagaagtggtcctgcaactttatccgcctccatccagtctattaattgttgccgggaagctagagtaagtagttcgccagttaatagtttgcgcaacgttgttgccattgctacaggcatcgtggtgtcacgctcgtcgtttggtatggcttcattcagctccggttcccaacgatcaaggcgagttacatgatcccccatgttgtgcaaaaaagcggttagctccttcggtcctccgatcgttgtcagaagtaagttggccgcagtgttatcactcatggttatggcagcactgcataattctcttactgtcatgccatccgtaagatgcttttctgtgactggtgagtactcaaccaagtcattctgagaatagtgtatgcggcgaccgagttgctcttgcccggcgtcaatacgggataataccgcgccacatagcagaactttaaaagtgctcatcattggaaaacgttcttcggggcgaaaactctcaaggatcttaccgctgttgagatccagttcgatgtaacccactcgtgcacccaactgatcttcagcatcttttactttcaccagcgtttctgggtgagcaaaaacaggaaggcaaaatgccgcaaaaaagggaataagggcgacacggaaatgttgaatactcatactcttcctttttcaatattattgaagcatttatcagggttattgtctcatgagcggatacatatttgaatgtatttagaaaaataaacaaataggggttccgcgcacatttccccgaaaagtgccacctgacgtctaagaaaccattattatcatgacattaacctataaaaataggcgtatcacgaggccctttcgtctcgcgcgtttcggtgatgacggtgaaaacctctgacacatgcagctcccggagacggtcacagcttgtctgtaagcggatgccgggagcagacaagcccgtcagggcgcgtcagcgggtgttggcgggtgtcggggctggcttaactatgcggcatcagagcagattgtactgagagtgcaccatatgcggtgtgaaataccgcacagatgcgtaaggagaaaataccgcatcaggcgccattcgccattcaggctgcgcaactgttgggaagggcgatcggtgcgggcctcttcgctattacgccagctggcgaaagggggatgtgctgcaaggcgattaagttgggtaacgccagggttttcccagtcacgacgttgtaaaacgacggccagt

SEQ ID NO: 12 - DNA, 4146 bp, synthetic construct
  source 1..4146: mol_type = other DNA
cactatgtggacatgaattcaattggctagcaggagtcaatgggaaaaacccattggagccaagtacactgactcaatagggactttccattgggttttgcccagtacataaggtcaatagggggtgagtcaacaggaaagtcccattggagccaagtacattgagtcaatagggactttccaatgggttttgcccagtacataaggtcaatgggaggtaagccaatgggtttttcccattactgacatgtatactgagtcattagggactttccaatgggttttgcccagtacataaggtcaataggggtgaatcaacaggaaagtcccattggagccaagtacactgagtcaatagggactttccattgggttttgcccagtacaaaaggtcaatagggggtgagtcaatgggtttttcccattattggcacatacataaggtcaataggggtgactagtggagaagagcatgcttgagggctgagtgcccctcagtgggcagagagcacatggcccacagtccctgagaagttggggggaggggtgggcaattgaactggtgcctagagaaggtggggcttgggtaaactgggaaagtgatgtggtgtactggctccacctttttccccagggtgggggagaaccatatataagtgcagtagtctctgtgaacattcaagcttctgccttctccctcctgtgagtttggtaagtcactgactgtctatgcctgggaaagggtgggcaggagatggggcagtgcaggaaaagtggcactatgaaccctgcagccctagacaattgtactaaccttcttctctttcctctcctgacaggttggtaaccaagccaccatgcagctgagaaaccctgagctgcacctgggctgtgctctggccctgagatttctggctctggtgtcctgggacatccctggtgctagagccctggataatggcctggccagaacacctacaatgggctggctgcactgggagagattcatgtgcaacctggactgccaagaggaacctgacagctgcatctctgagaagctgttcatggaaatggctgagctgatggtgtctgaaggctggaaggatgctggctatgagtacctgtgcattgatgactgctggatggcccctcagagagactctgaaggcagactccaggctgaccctcagaggttccctcatggcatcagacagctggccaactatgtgcacagcaagggcctgaagctgggcatctatgctgatgtgggcaacaagacctgtgctggcttccctggcagctttggctactatgacattgatgcccagacctttgctgactggggagttgacctgctgaagtttgatggctgctactgtgacagcctggaaaacctggctgatggctacaagcacatgagcctggctctgaacagaacaggcagatccattgtgtacagctgtgaatggcccctgtacatgtggcccttccagaagcctaactacacagagatcagacagtactgcaaccattggaggaactttgctgatattgatgatagctggaagtccatcaagagcatcctggactggaccagcttcaatcaagaaaggattgtggatgtggctggccctggtggctggaatgaccctgacatgctggtcattggcaactttggcctgagctggaaccagcaagtgacccagatggccctgtgggccattatggctgcccctctgttcatgagcaatgacctgagacacatcagccctcaggctaaggccctgctccaggacaaggatgtgattgctatcaatcaggaccctctgggcaagcagggctaccagcttagacagggagacaactttgaagtgtgggaaagacccctgtctggcctggcttgggctgttgccatgatcaacagacaagagattggaggccccaggtcctacaccattgctgtggccagccttggcaaaggggttgcctgtaatcctgcctgcttcatcacccagctgctgcctgtgaagagaaagctgggcttttatgagtggaccagcagactgagaagccacatcaaccccacaggcacagtgctgctgcaactggaaaacacaatgcagatgtccctgaaggacctgctgggtggaggaggtagtagaaacacaggcagaggtggagaggaaaagaagaaagagaaagaaaaagaggaacaagaggaaagggaaactaagacccctgagtgccccagccacacacagcctctgggagtgttcctgtttcctccaaagccaaaggacaccctgatgatcagcagaacccctgaagtgacctgtgtggtggtggatgtgtcccaagaggacccagaggtgcagttcaattggtatgtggatggtgttgaggtgcacaatgccaagaccaagcctagagaggaacagttcaacagcacctacagagtggtgtctgtgctgacagtgctgcaccaggactggctgaatggcaaagagtacaagtgcaaggtgtccaacaagggcctgcctagcagcattgaaaagaccatcagcaaggccaagggccagccaagagaaccccaggtgtacacactgcctccaagccaagaagagatgaccaagaaccaggtgtccctgacctgcctggtcaagggcttctacccctctgacattgctgtggaatgggagagcaatggccagcctgagaacaactacaagaccacacctcctgtgctggactctgatggctcattcttcctgtacagcagactgacagtggacaagagcagatggcaagagggcaatgtgttcagctgctctgtgatgcatgaggccctgcacaaccactacacccagaagtctctgagcctgagcctgggcaaatgaagatctacttctggctaataaaagatcagagctctagtgatctgtgtgttggttttttgtgtctgcattctagctctagtgatcagcagttcaacctgttgatagtatgtactaagctctcatgtttaatgtactaagctctcatgtttaatgaactaaaccctcatggctaatgtactaagctctcatggctaatgtactaagctctcatgtttcatgtactaagctctcatgtttgaacaataaaattaatataaatcagcaacttaaatagcctctaaggttttaagttttataagaaaaaaaagaatatataaggcttttaaaggttttaaggtttcctaggttatcctcatatgagctcttagaaaaactcatccagcatcaaatgaaactgcaatttattcatatcaggattatcaataccatatttttgaaaaagtcttttctgtaatgaaggagaaaactcacccaggcagttccataggatggcaagatcctggtatctgtctgcaattccaactcttccaacatcaatacaacctattaatttcccctcatcaaaaataaggttatcaagtgagaaatcaccatgagtgaccactgaatctggtgagaatggcaaaagattatgcatttctttccagacttgttcaacaggccagccatttctctcatcatcaaaatcactggcatcaaccaaaccattattcattcttgattgggcctgagccagtctaaatactctatcagagttaaaaggacaattacaaacaggaatggaatgcaatcttctcaggaacactgccagggcatcaacaatattttcacctgaatcaggatattcttccaatacctggaatgctgttttccctgggatggcagtggtgagtaaccatgcatcatcaggagttctgataaaatgcttgatggttggaagaggcataaattcagtcagccagtttagtctgaccatctcatctgtaacatcattggcaacagaacctttgccatgtttcagaaacaactctggggcatctggcttcccatacaatctatagattgtggcacctgattgcccaacattatctctagcccatttatacccatataaatcagcatccatgttggaatttaatcttggcctggagcaagaggtttctctttgaatatggctcatacatgtgcacctcctatagtgagttgtattatactatgcagatatactatgccaatgtttaattgtcag

SEQ ID NO: 13 - DNA, 5533 bp, synthetic construct
  source 1..5533: mol_type = other DNA
cactatgtgttaattaaaattatctctaaggcatgtgaactggctgtcttggttttcatctgtacttcatctgctacctctgtgacctgaaacatatttataattccattaagctgtgcatatgatagatttatcatatgtattttccttaaaggatttttgtaagaactaattgaattgatacctgtaaagtctttatcacactacccaataaataataaatctctttgttcagctctctgtttctataaatatgtaccagttttattgtttttagtggtagtgattttattctctttctatatatatacacacacatgtgtgcattcataaatatatacaatttttatgaataaaaaattattagcaatcaatattgaaaaccactgatttttgtttatgtgagcaaacagcagattaaaaggaatttgaattctcatagctagcaggagtcaatgggaaaaacccattggagccaagtacactgactcaatagggactttccattgggttttgcccagtacataaggtcaatagggggtgagtcaacaggaaagtcccattggagccaagtacattgagtcaatagggactttccaatgggttttgcccagtacataaggtcaatgggaggtaagccaatgggtttttcccattactgacatgtatactgagtcattagggactttccaatgggttttgcccagtacataaggtcaataggggtgaatcaacaggaaagtcccattggagccaagtacactgagtcaatagggactttccattgggttttgcccagtacaaaaggtcaatagggggtgagtcaatgggtttttcccattattggcacatacataaggtcaataggggtgactagtggagaagagcatgcttgagggctgagtgcccctcagtgggcagagagcacatggcccacagtccctgagaagttggggggaggggtgggcaattgaactggtgcctagagaaggtggggcttgggtaaactgggaaagtgatgtggtgtactggctccacctttttccccagggtgggggagaaccatatataagtgcagtagtctctgtgaacattcaagcttctgccttctccctcctgtgagtttggtaagtcactgactgtctatgcctgggaaagggtgggcaggagatggggcagtgcaggaaaagtggcactatgaaccctgcagccctagacaattgtactaaccttcttctctttcctctcctgacaggttggtaaccaagccaccatgggatggtccctgatcctgctgtttctggtggctgtggccaccagagtgctgtctcaggtgcagctggtggaaagtggtggtggccttgtgaagcctggtggcagcctgagactgagctgtgctgcttctggcttcaccttctctgactactacatgagctggatcagacaggcccctggcaaaggcctggaatgggtgtcctacatcagcagctctgtgtccaccatctactatgctgactctgtgaagggcagattcaccatcagcagagacaatgccaagaacagcctgtacctccagatgaactccctgagagctgaggacactgctgtgtactactgtgccagagatggggtcatccctcctagatttgactactggggccagggcaccctggtcactgttagctctgcttccacaaagggcccctctgtgttccctctggctcctagcagcaagagcaccagtggtggaacagctgccctgggctgtctggtcaaggactactttcctgagcctgtgacagtgtcctggaactctggggctctgacatctggggtgcacacattccctgctgtgctccagtcctctggcctgtactccctgtcctctgtggtcacagtgccaagctctagcctgggcacccagacctacatctgcaatgtgaaccacaagcctagcaacaccaaggtggacaagaaggtggaacccaagagctgtgacaagacccacacctgtcctccatgtcctgctccagaactgcttggaggaccttctgtgtttctgttccctccaaagcctaaggacaccctgatgatcagcagaacccctgaagtgacctgtgtggtggttgatgtgtcccatgaggacccagaagtgaagttcaattggtatgtggatggtgttgaggtgcacaatgctaagaccaagcctagagaggaacagtacaacagcacctacagagtggtgtctgtgctgacagtgctgcaccaggactggctgaatggcaaagagtacaagtgcaaggtgtccaacaaggccctgcctgctcctattgaaaagaccatctccaaggccaagggccagcctagggaaccccaggtttacacactgccacctagcagagatgagctgaccaagaaccaggtgtccctgacatgcctggttaagggcttctacccctctgacattgctgtggaatgggagagcaatggccagccagagaacaactacaagacaacccctcctgtgctggactctgatggctcattcttcctgtacagcaagctgactgtggacaagtccagatggcagcaaggcaatgtgttctcctgctctgtgatgcatgaggccctgcacaaccactacacacagaagtccctgtctctgagccctggcaagagaaagagaaggagtggctctggggccaccaacttcagcctgctgaaacaggctggggatgttgaagagaaccctggacctatggacttccaggtgcagatcatcagctttctgcttatctctgccagtgtgatcatgagcaggggagacatccagatgacccagtctccatccagcctgtctgcctctgtgggagacagagtgaccatcacctgtcaggcctctcaggacatcagcaactacctgaactggtatcagcaaaagcctggcaaggcccctaagctgctcatctatgatgccagcaacctggaaacaggggtgccctccagattttctggctctggatctggcactgacttcacctttaccatcagctccctgcaacctgaggacattgccacctactactgccagcagtatgacaacctgcctctgacttttggtggtggtacaaaggtggaaatcaagaggacagtggctgctccatctgtgttcatcttcccaccatctgatgaacagctgaagagtggcacagcctctgttgtgtgtctgctgaacaacttctaccctagggaagccaaggtgcagtggaaggttgacaatgctctccagtctggcaacagccaagaatctgtgactgagcaggactccaaggacagcacatacagcctgagcagcaccctgacactgagcaaggctgactatgagaagcacaaagtctatgcctgtgaagtgacacaccaggggctgagcagcccagtgaccaagtctttcaacaggggagagtgctgaagatctacttctggctaataaaagatcagagctctagtgatctgtgtgttggttttttgtgtctgcattctagcaagtcaatatgttcaccccaaaaaagctgtttgttaacttgtcaacctcattctaaaatgtatatagaagcccaaaagacaataacaaaaatattcttgtagaacaaaatgggaaagaatgttccactaaatatcaagatttagagcaaagcatgagatgtgtggggatagacagtgaggctgataaaatagagtagagctcagaaacagacccattgatatatgtaagtgacctatgaaaaaaatatggcattttacaatgggaaaatgatggtctttttcttttttagaaaaacagggaaatatatttatatgtaaaaaataaaagggaacccatatgtcataccatacacacaaaaaaattccagtgaattataagtctaaatggagaaggcaaaactttaaatcttttagaaaataatatagaagcatgccatcaagacttcagtgtagagaaaaatttcttatgactcaaagtcctaaccacaaagaaaagattgttaattagattgcatgaatattaagacttatttttaaaattaaaaaaccattaagaaaagtcaggccatagaatgacagaaaatatttgcaacaccccagtaaagagaattgtaatatgcagattataaaaagaagtcttacaaatcagtaaaaaataaaactagacaaaaatttgaacagatgaaagagaaactctaaataatcattacacatgagaaactcaatctcagaaatcagagaactatcattgcatatacactaaattagagaaatattaaaaggctaagtaacatctgtggcttaattaatctagctctagtgatcagcagttcaacctgttgatagtatgtactaagctctcatgtttaatgtactaagctctcatgtttaatgaactaaaccctcatggctaatgtactaagctctcatggctaatgtactaagctctcatgtttcatgtactaagctctcatgtttgaacaataaaattaatataaatcagcaacttaaatagcctctaaggttttaagttttataagaaaaaaaagaatatataaggcttttaaaggttttaaggtttcctaggttatcctcatatgagctcttagaaaaactcatccagcatcaaatgaaactgcaatttattcatatcaggattatcaataccatatttttgaaaaagtcttttctgtaatgaaggagaaaactcacccaggcagttccataggatggcaagatcctggtatctgtctgcaattccaactcttccaacatcaatacaacctattaatttcccctcatcaaaaataaggttatcaagtgagaaatcaccatgagtgaccactgaatctggtgagaatggcaaaagattatgcatttctttccagacttgttcaacaggccagccatttctctcatcatcaaaatcactggcatcaaccaaaccattattcattcttgattgggcctgagccagtctaaatactctatcagagttaaaaggacaattacaaacaggaatggaatgcaatcttctcaggaacactgccagggcatcaacaatattttcacctgaatcaggatattcttccaatacctggaatgctgttttccctgggatggcagtggtgagtaaccatgcatcatcaggagttctgataaaatgcttgatggttggaagaggcataaattcagtcagccagtttagtctgaccatctcatctgtaacatcattggcaacagaacctttgccatgtttcagaaacaactctggggcatctggcttcccatacaatctatagattgtggcacctgattgcccaacattatctctagcccatttatacccatataaatcagcatccatgttggaatttaatcttggcctggagcaagaggtttctctttgaatatggctcatacatgtgcacctcctatagtgagttgtattatactatgcagatatactatgccaatgtttaattgtcag

SEQ ID NO: 14 - DNA, 7298 bp, synthetic construct
  source 1..7298: mol_type = other DNA
cactatgtgttaattaaaattatctctaaggcatgtgaactggctgtcttggttttcatctgtacttcatctgctacctctgtgacctgaaacatatttataattccattaagctgtgcatatgatagatttatcatatgtattttccttaaaggatttttgtaagaactaattgaattgatacctgtaaagtctttatcacactacccaataaataataaatctctttgttcagctctctgtttctataaatatgtaccagttttattgtttttagtggtagtgattttattctctttctatatatatacacacacatgtgtgcattcataaatatatacaatttttatgaataaaaaattattagcaatcaatattgaaaaccactgatttttgtttatgtgagcaaacagcagattaaaaggaatttgaattctcatagctagcaggagtcaatgggaaaaacccattggagccaagtacactgactcaatagggactttccattgggttttgcccagtacataaggtcaatagggggtgagtcaacaggaaagtcccattggagccaagtacattgagtcaatagggactttccaatgggttttgcccagtacataaggtcaatgggaggtaagccaatgggtttttcccattactgacatgtatactgagtcattagggactttccaatgggttttgcccagtacataaggtcaataggggtgaatcaacaggaaagtcccattggagccaagtacactgagtcaatagggactttccattgggttttgcccagtacaaaaggtcaatagggggtgagtcaatgggtttttcccattattggcacatacataaggtcaataggggtgactagtggagaagagcatgcttgagggctgagtgcccctcagtgggcagagagcacatggcccacagtccctgagaagttggggggaggggtgggcaattgaactggtgcctagagaaggtggggcttgggtaaactgggaaagtgatgtggtgtactggctccacctttttccccagggtgggggagaaccatatataagtgcagtagtctctgtgaacattcaagcttctgccttctccctcctgtgagtttggtaagtcactgactgtctatgcctgggaaagggtgggcaggagatggggcagtgcaggaaaagtggcactatgaaccctgcagccctagacaattgtactaaccttcttctctttcctctcctgacaggttggtaaccaagccaccatgggatggtccctgatcctgctgtttctggtggctgtggccaccagagtgctgtctcaggtgcagctggtggaaagtggtggtggccttgtgaagcctggtggcagcctgagactgagctgtgctgcttctggcttcaccttctctgactactacatgagctggatcagacaggcccctggcaaaggcctggaatgggtgtcctacatcagcagctctgtgtccaccatctactatgctgactctgtgaagggcagattcaccatcagcagagacaatgccaagaacagcctgtacctccagatgaactccctgagagctgaggacactgctgtgtactactgtgccagagatggggtcatccctcctagatttgactactggggccagggcaccctggtcactgttagctctgcttccacaaagggcccctctgtgttccctctggctcctagcagcaagagcaccagtggtggaacagctgccctgggctgtctggtcaaggactactttcctgagcctgtgacagtgtcctggaactctggggctctgacatctggggtgcacacattccctgctgtgctccagtcctctggcctgtactccctgtcctctgtggtcacagtgccaagctctagcctgggcacccagacctacatctgcaatgtgaaccacaagcctagcaacaccaaggtggacaagaaggtggaacccaagagctgtgacaagacccacacctgtcctccatgtcctgctccagaactgcttggaggaccttctgtgtttctgttccctccaaagcctaaggacaccctgatgatcagcagaacccctgaagtgacctgtgtggtggttgatgtgtcccatgaggacccagaagtgaagttcaattggtatgtggatggtgttgaggtgcacaatgctaagaccaagcctagagaggaacagtacaacagcacctacagagtggtgtctgtgctgacagtgctgcaccaggactggctgaatggcaaagagtacaagtgcaaggtgtccaacaaggccctgcctgctcctattgaaaagaccatctccaaggccaagggccagcctagggaaccccaggtttacacactgccacctagcagagatgagctgaccaagaaccaggtgtccctgacatgcctggttaagggcttctacccctctgacattgctgtggaatgggagagcaatggccagccagagaacaactacaagacaacccctcctgtgctggactctgatggctcattcttcctgtacagcaagctgactgtggacaagtccagatggcagcaaggcaatgtgttctcctgctctgtgatgcatgaggccctgcacaaccactacacacagaagtccctgtctctgagccctggcaagtgaagatctacttctggctaataaaagatcagagctctagtgatctgtgtgttggttttttgtgtctgcattctagcagagccccactgtgttcatcttacagatggaaatactgacattcagaggagttagttaacttgcctaggtgattcagctaataagtgcaagaaagatttcaatccaaggtgatttgattctgaagcctgtgctaatcacattacaccaagctacaacttcatttataaataataagtcagctttcaagggcctttcaggtgtcctgcacttctacaagctgtgccatttagtgaacacaaaatgagccttctgatgaagtagtcttttcattatttcagatattagaacactaaaattcttagctgccagctgattgaaggctgggacaaaattcaaacatgcatctacaacaatatatatctcaatgttagtctccaaattctattgacttcaactcaagagaatataaagagctagtctttatacactctttaaggtatgatatcatctggaaagtaacaaaattgatgcaaatttgaatgaactttatcatggtgtatttacacaatgtgtttcttctccctgcaatgtatttctttctctaattccttccatttgatctttcatacacaatctggttctgatgtatgttttttggatgcacttttcaactccaaaagacagagctagttactttcttcctggtgctccaagcactgtatttgtatctgtattcaagccctttgcaatattgtactggatcattatttcacctctaggatggcttccccaggcaacttgtgttcacccagagactacattttgtatcttgttgacctttgaacttccaccagtgtctaaaaataatatgtatgcaaaattacttgctatgagaatgtataattaaacaatataaaaaggagaagcaaggagagaaacacaggtgtgtatttgtgtttgtgtgcttaaaaggcagtgtggaaaaggaagaaatgccatttatagtgaggagacaaagttatattacctcttatctggcttttaaggagattttgctgagctaaaaatcctatattcatagaaaagccttacctgagttgccaatacctcaattcagtctagcatgttacataacttatggtaaatggcctgcctggctgactgcccaatgacccctgcccaatgatgtcaataatgatgtatgttcccatgtaatgccaatagggactttccattgatgtcaatgggtggagtatttatggtaactgcccacttggcagtacatcaagtgtatcatatgccaagtatgccccctattgatgtcaatgatggtaaatggcctgcctggcattatgcccagtacatgaccttatgggactttcctacttggcagtacatctatgtattagtcattgctattatctagcactagtggagaagagcatgcttgagggctgagtgcccctcagtgggcagagagcacatggcccacagtccctgagaagttggggggaggggtgggcaattgaactggtgcctagagaaggtggggcttgggtaaactgggaaagtgatgtggtgtactggctccacctttttccccagggtgggggagaaccatatataagtgcagtagtctctgtgaacattcaagcttctgccttctccctcctgtgagtttggtaagtcactgactgtctatgcctgggaaagggtgggcaggagatggggcagtgcaggaaaagtggcactatgaaccctgcagccctagacaattgtactaaccttcttctctttcctctcctgacaggttggtaaccaagccaccatggacttccaggtgcagatcatcagctttctgcttatctctgccagtgtgatcatgagcaggggagacatccagatgacccagtctccatccagcctgtctgcctctgtgggagacagagtgaccatcacctgtcaggcctctcaggacatcagcaactacctgaactggtatcagcaaaagcctggcaaggcccctaagctgctcatctatgatgccagcaacctggaaacaggggtgccctccagattttctggctctggatctggcactgacttcacctttaccatcagctccctgcaacctgaggacattgccacctactactgccagcagtatgacaacctgcctctgacttttggtggtggtacaaaggtggaaatcaagaggacagtggctgctccatctgtgttcatcttcccaccatctgatgaacagctgaagagtggcacagcctctgttgtgtgtctgctgaacaacttctaccctagggaagccaaggtgcagtggaaggttgacaatgctctccagtctggcaacagccaagaatctgtgactgagcaggactccaaggacagcacatacagcctgagcagcaccctgacactgagcaaggctgactatgagaagcacaaagtctatgcctgtgaagtgacacaccaggggctgagcagcccagtgaccaagtctttcaacaggggagagtgctgaagatctacttctggctaataaaagatcagagctctagtgatctgtgtgttggttttttgtgtctgcattctagcaagtcaatatgttcaccccaaaaaagctgtttgttaacttgtcaacctcattctaaaatgtatatagaagcccaaaagacaataacaaaaatattcttgtagaacaaaatgggaaagaatgttccactaaatatcaagatttagagcaaagcatgagatgtgtggggatagacagtgaggctgataaaatagagtagagctcagaaacagacccattgatatatgtaagtgacctatgaaaaaaatatggcattttacaatgggaaaatgatggtctttttcttttttagaaaaacagggaaatatatttatatgtaaaaaataaaagggaacccatatgtcataccatacacacaaaaaaattccagtgaattataagtctaaatggagaaggcaaaactttaaatcttttagaaaataatatagaagcatgccatcaagacttcagtgtagagaaaaatttcttatgactcaaagtcctaaccacaaagaaaagattgttaattagattgcatgaatattaagacttatttttaaaattaaaaaaccattaagaaaagtcaggccatagaatgacagaaaatatttgcaacaccccagtaaagagaattgtaatatgcagattataaaaagaagtcttacaaatcagtaaaaaataaaactagacaaaaatttgaacagatgaaagagaaactctaaataatcattacacatgagaaactcaatctcagaaatcagagaactatcattgcatatacactaaattagagaaatattaaaaggctaagtaacatctgtggcttaattaatctagctctagtgatcagcagttcaacctgttgatagtatgtactaagctctcatgtttaatgtactaagctctcatgtttaatgaactaaaccctcatggctaatgtactaagctctcatggctaatgtactaagctctcatgtttcatgtactaagctctcatgtttgaacaataaaattaatataaatcagcaacttaaatagcctctaaggttttaagttttataagaaaaaaaagaatatataaggcttttaaaggttttaaggtttcctaggttatcctcatatgagctcttagaaaaactcatccagcatcaaatgaaactgcaatttattcatatcaggattatcaataccatatttttgaaaaagtcttttctgtaatgaaggagaaaactcacccaggcagttccataggatggcaagatcctggtatctgtctgcaattccaactcttccaacatcaatacaacctattaatttcccctcatcaaaaataaggttatcaagtgagaaatcaccatgagtgaccactgaatctggtgagaatggcaaaagattatgcatttctttccagacttgttcaacaggccagccatttctctcatcatcaaaatcactggcatcaaccaaaccattattcattcttgattgggcctgagccagtctaaatactctatcagagttaaaaggacaattacaaacaggaatggaatgcaatcttctcaggaacactgccagggcatcaacaatattttcacctgaatcaggatattcttccaatacctggaatgctgttttccctgggatggcagtggtgagtaaccatgcatcatcaggagttctgataaaatgcttgatggttggaagaggcataaattcagtcagccagtttagtctgaccatctcatctgtaacatcattggcaacagaacctttgccatgtttcagaaacaactctggggcatctggcttcccatacaatctatagattgtggcacctgattgcccaacattatctctagcccatttatacccatataaatcagcatccatgttggaatttaatcttggcctggagcaagaggtttctctttgaatatggctcatacatgtgcacctcctatagtgagttgtattatactatgcagatatactatgccaatgtttaattgtcag

SEQ ID NO: 15 - DNA, 6397 bp, synthetic construct
  source 1..6397: mol_type = other DNA
cactatgtggacatgaattcaattggctagccaggagtcaatgggaaaaacccattggagccaagtacactgactcaatagggactttccattgggttttgcccagtacataaggtcaatagggggtgagtcaacaggaaagtcccattggagccaagtacattgagtcaatagggactttccaatgggttttgcccagtacataaggtcaatgggaggtaagccaatgggtttttcccattactgacatgtatactgagtcattagggactttccaatgggttttgcccagtacataaggtcaataggggtgaatcaacaggaaagtcccattggagccaagtacactgagtcaatagggactttccattgggttttgcccagtacaaaaggtcaatagggggtgagtcaatgggtttttcccattattggcacatacataaggtcaataggggtgactagtggagaagagcatgcttgagggctgagtgcccctcagtgggcagagagcacatggcccacagtccctgagaagttggggggaggggtgggcaattgaactggtgcctagagaaggtggggcttgggtaaactgggaaagtgatgtggtgtactggctccacctttttccccagggtgggggagaaccatatataagtgcagtagtctctgtgaacattcaagcttctgccttctccctcctgtgagtttggtaagtcactgactgtctatgcctgggaaagggtgggcaggagatggggcagtgcaggaaaagtggcactatgaaccctgcagccctagacaattgtactaaccttcttctctttcctctcctgacaggttggtaaccaagccaccatggctacaggcagcagaacctctctgctgctggcttttggcctgctgtgtctgccttggctgcaagagggctctgctttccctacaatccctctgagcaggctgtttgacaatgccatgctgagagcccacagactgcaccagctggcctttgacacctaccaagagtttgaagaggcttacatccccaaagagcagaagtacagcttcctccagaatcctcagaccagcctgtgcttctctgagagcatccccacacctagcaacagagaggaaacccagcagaagtccaacctggaactgctgagaatcagcctgctgctgatccagagctggctggaacctgtgcagttcctgagatcagtgtttgccaacagcctggtgtatggggcctctgacagcaatgtgtatgacctgctgaaggacctggaagagggcatccagacactgatgggcagactggaagatggcagccccagaacaggccagattttcaagcagacctacagcaagtttgacaccaacagccacaatgatgatgccctgctcaagaactatgggctgctgtactgcttcagaaaggacatggacaaggtggaaaccttcctgaggattgtgcagtgcagaagtgtggaaggcagctgtggctttgagcccaagagctgtgacaagacccacacctgtcctccatgtcctgctccagagctgcttggaggaccttctgtgtttctgttccctccaaagccaaaggacaccctgatgatcagcagaacccctgaagtgacctgtgtggtggtggatgtgtcccatgaggacccagaagtgaagttcaattggtatgtggatggtgttgaggtgcacaatgccaagaccaagcctagagaggaacagtacaacagcacctacagggttgtgtcagtgctgactgtgctgcaccaggactggctgaatggcaaagagtacaagtgcaaggtgtccaacaaggccctgcctgctcctattgaaaagaccatcagcaaggccaagggacagcctagggaaccccaggtgtacacactgccacctagcagagatgagctgaccaagaatcaggtgtccctgacatgccttgtgaagggcttctacccttctgacattgcagtggaatgggagagcaatggccagcctgagaacaactacaagacaacccctcctgtgctggactctgatggctcattcttcctgtactccaagctgacagtggacaagtccagatggcagcaaggcaatgtgttcagctgctctgtgatgcatgaggccctgcacaaccactacacacagaagtccctgtctctgagccctggcaagtgaagatctacttctggctaataaaagatcagagctctagtgatctgtgtgttggttttttgtgtctgcattctagcaggagtcaatgggaaaaacccattggagccaagtacactgactcaatagggactttccattgggttttgcccagtacataaggtcaatagggggtgagtcaacaggaaagtcccattggagccaagtacattgagtcaatagggactttccaatgggttttgcccagtacataaggtcaatgggaggtaagccaatgggtttttcccattactgacatgtatactgagtcattagggactttccaatgggttttgcccagtacataaggtcaataggggtgaatcaacaggaaagtcccattggagccaagtacactgagtcaatagggactttccattgggttttgcccagtacaaaaggtcaatagggggtgagtcaatgggtttttcccattattggcacatacataaggtcaataggggtgactagtggagaagagcatgcttgagggctgagtgcccctcagtgggcagagagcacatggcccacagtccctgagaagttggggggaggggtgggcaattgaactggtgcctagagaaggtggggcttgggtaaactgggaaagtgatgtggtgtactggctccacctttttccccagggtgggggagaaccatatataagtgcagtagtctctgtgaacattcaagcttctgccttctccctcctgtgagtttggtaagtcactgactgtctatgcctgggaaagggtgggcaggagatggggcagtgcaggaaaagtggcactatgaaccctgcagccctagacaattgtactaaccttcttctctttcctctcctgacaggttggtaaccaagccaccatgcagctgagaaaccctgagctgcacctgggctgtgctctggccctgagatttctggctctggtgtcctgggacatccctggtgctagagccctggataatggcctggccagaacacctacaatgggctggctgcactgggagagattcatgtgcaacctggactgccaagaggaacctgacagctgcatctctgagaagctgttcatggaaatggctgagctgatggtgtctgaaggctggaaggatgctggctatgagtacctgtgcattgatgactgctggatggcccctcagagagactctgaaggcagactccaggctgaccctcagaggttccctcatggcatcagacagctggccaactatgtgcacagcaagggcctgaagctgggcatctatgctgatgtgggcaacaagacctgtgctggcttccctggcagctttggctactatgacattgatgcccagacctttgctgactggggagttgacctgctgaagtttgatggctgctactgtgacagcctggaaaacctggctgatggctacaagcacatgagcctggctctgaacagaacaggcagatccattgtgtacagctgtgaatggcccctgtacatgtggcccttccagaagcctaactacacagagatcagacagtactgcaaccattggaggaactttgctgatattgatgatagctggaagtccatcaagagcatcctggactggaccagcttcaatcaagaaaggattgtggatgtggctggccctggtggctggaatgaccctgacatgctggtcattggcaactttggcctgagctggaaccagcaagtgacccagatggccctgtgggccattatggctgcccctctgttcatgagcaatgacctgagacacatcagccctcaggctaaggccctgctccaggacaaggatgtgattgctatcaatcaggaccctctgggcaagcagggctaccagcttagacagggagacaactttgaagtgtgggaaagacccctgtctggcctggcttgggctgttgccatgatcaacagacaagagattggaggccccaggtcctacaccattgctgtggccagccttggcaaaggggttgcctgtaatcctgcctgcttcatcacccagctgctgcctgtgaagagaaagctgggcttttatgagtggaccagcagactgagaagccacatcaaccccacaggcacagtgctgctgcaactggaaaacacaatgcagatgtccctgaaggacctgctgggtggaggaggtagtagaaacacaggcagaggtggagaggaaaagaagaaagagaaagaaaaagaggaacaagaggaaagggaaactaagacccctgagtgccccagccacacacagcctctgggagtgttcctgtttcctccaaagccaaaggacaccctgatgatcagcagaacccctgaagtgacctgtgtggtggtggatgtgtcccaagaggacccagaggtgcagttcaattggtatgtggatggtgttgaggtgcacaatgccaagaccaagcctagagaggaacagttcaacagcacctacagagtggtgtctgtgctgacagtgctgcaccaggactggctgaatggcaaagagtacaagtgcaaggtgtccaacaagggcctgcctagcagcattgaaaagaccatcagcaaggccaagggccagccaagagaaccccaggtgtacacactgcctccaagccaagaagagatgaccaagaaccaggtgtccctgacctgcctggtcaagggcttctacccctctgacattgctgtggaatgggagagcaatggccagcctgagaacaactacaagaccacacctcctgtgctggactctgatggctcattcttcctgtacagcagactgacagtggacaagagcagatggcaagagggcaatgtgttcagctgctctgtgatgcatgaggccctgcacaaccactacacccagaagtctctgagcctgagcctgggcaaatgaagatctacttctggctaataaaagatcagagctctagtgatctgtgtgttggttttttgtgtctgcattctagctctagtgatcagcagttcaacctgttgatagtatgtactaagctctcatgtttaatgtactaagctctcatgtttaatgaactaaaccctcatggctaatgtactaagctctcatggctaatgtactaagctctcatgtttcatgtactaagctctcatgtttgaacaataaaattaatataaatcagcaacttaaatagcctctaaggttttaagttttataagaaaaaaaagaatatataaggcttttaaaggttttaaggtttcctaggttatcctcatatgagctcttagaaaaactcatccagcatcaaatgaaactgcaatttattcatatcaggattatcaataccatatttttgaaaaagtcttttctgtaatgaaggagaaaactcacccaggcagttccataggatggcaagatcctggtatctgtctgcaattccaactcttccaacatcaatacaacctattaatttcccctcatcaaaaataaggttatcaagtgagaaatcaccatgagtgaccactgaatctggtgagaatggcaaaagattatgcatttctttccagacttgttcaacaggccagccatttctctcatcatcaaaatcactggcatcaaccaaaccattattcattcttgattgggcctgagccagtctaaatactctatcagagttaaaaggacaattacaaacaggaatggaatgcaatcttctcaggaacactgccagggcatcaacaatattttcacctgaatcaggatattcttccaatacctggaatgctgttttccctgggatggcagtggtgagtaaccatgcatcatcaggagttctgataaaatgcttgatggttggaagaggcataaattcagtcagccagtttagtctgaccatctcatctgtaacatcattggcaacagaacctttgccatgtttcagaaacaactctggggcatctggcttcccatacaatctatagattgtggcacctgattgcccaacattatctctagcccatttatacccatataaatcagcatccatgttggaatttaatcttggcctggagcaagaggtttctctttgaatatggctcatacatgtgcacctcctatagtgagttgtattatactatgcagatatactatgccaatgtttaattgtcag

SEQ ID NO: 16 - DNA, 423 bp, synthetic construct
  source 1..423: mol_type = other DNA
gagtcaatgggaaaaacccattggagccaagtacactgactcaatagggactttccattgggttttgcccagtacataaggtcaatagggggtgagtcaacaggaaagtcccattggagccaagtacattgagtcaatagggactttccaatgggttttgcccagtacataaggtcaatgggaggtaagccaatgggtttttcccattactgacatgtatactgagtcattagggactttccaatgggttttgcccagtacataaggtcaataggggtgaatcaacaggaaagtcccattggagccaagtacactgagtcaatagggactttccattgggttttgcccagtacaaaaggtcaatagggggtgagtcaatgggtttttcccattattggcacatacataaggtcaataggggtg

SEQ ID NO: 17 - DNA, 296 bp, synthetic construct
  source 1..296: mol_type = other DNA
gttacataacttatggtaaatggcctgcctggctgactgcccaatgacccctgcccaatgatgtcaataatgatgtatgttcccatgtaatgccaatagggactttccattgatgtcaatgggtggagtatttatggtaactgcccacttggcagtacatcaagtgtatcatatgccaagtatgccccctattgatgtcaatgatggtaaatggcctgcctggcattatgcccagtacatgaccttatgggactttcctacttggcagtacatctatgtattagtcattgctatta

SEQ ID NO: 18 - DNA, 235 bp, synthetic construct
  source 1..235: mol_type = other DNA
ccatggtgatgggttttggcagtacatcaatgggtgtggatagtggtttgacccatggggatttccaagtctccaccccattgatgccaatgggagtttgttttggcaccaaaatcaatgggactttccaaaatgttgtaacaactctgccccattgatggaaatgggtggtaggtgtgtgtggtgggaggtctatataagcagagcttgtttagtgaactggatgcacctacta

SEQ ID NO: 19 - DNA, 281 bp, synthetic construct
  source 1..281: mol_type = other DNA
tcagggccccaacccccccaagcccccatttcacaacatgctggtgctacaggtgtgtgacttccccttgctttggggtggggggctgagactcctatgtgctctggattggtcaggcatggcctttggccctgcctcctgccactgcagattggctgctaggcctccctgagtgccctgcctctgagggctggtgcaccataaaagaagctgccctagccatgtccccttgcagtttggtggtcctgtgggtctgtctcaagcttgctgccagaacacag

SEQ ID NO: 20 - DNA, 182 bp, synthetic construct
  source 1..182: mol_type = other DNA
ttctgccagagtgtgtgagggcctccagtggctgcccctcccccacagcaggggtggggtcctgtgcccactggaaggagtgggcttggggtgggtggtgctgattggctggggtgggcctgatgctgatgtggctataagagaccacaagtgacctgcagggccagatgttctttgctgaa

SEQ ID NO: 21 - DNA, 547 bp, synthetic construct
  source 1..547: mol_type = other DNA
agttactggtggaaatggtcttgggttgagaggtcacctgagggacaggcagctgctgaaccaataggactggtgcacagggtggatgctgcccctcattggtggctgttgagagtgaccaagagccaatgagtcagcctggggggtgtagcagtgatgtaagttgtggaggaggctgctttgaattggcagtggccagcttggtggcatggaccaatcagtgtcctccaatgaggagtgcctttgccaattggaggcctccatgatggggctggggggagggtatataagctgagttggtggtggtgtgctccacatgggctgagaccacagtgatgggagtgtctgcctctgtggggctgagaggtaagtgctgtggcctgccctttccaggccaacttggagcctgtcttgtggctctgcctgattgggggctcctgttgccctcagattggttggaatgctgttgtgctctgggactacaagcctgttgctgggcctggagactgctgaaggactgctgagcactgtcctcagtgctggcacc

SEQ ID NO: 22 - DNA, 682 bp, synthetic construct
  source 1..682: mol_type = other DNA
gtgcagtcgacactgtctcaaaaaccaaaccaaaccaaaacccaacccaaaccaaacaaagccaaacaacaacaacaaaaacaaaaaaacccaccaaaaaaaccaaggaaacaaaacaaccaaaaatcaaaaaactaggctactttaaaatgtcattatttattttgttaaaattcctgagataaacactattctaacaaaagagccattaagactaagaatctctaagatagtttttatgttctcaaattcagaagaactaaacacattattgcagtattaataaaataaaaactcaagataagaaggtcaaatgtgtccaagataattgtctcctccacaatgaggcaaatccataaggaataatggggggaagttcaatgcattagcttttgacagtcaaaacaggaacctttaaaatactctgttcatggttaaaaataatttgtactctaagtccagtgatcattgccagggagaaccaaagttgagaaatttctattaaaaacatgactcagaggaaaacatacagggtctggtcatgaaggaaatgatctggcccccattggtcactcctacagtcacatggtcagggcatctttaaaagtgagctatctggacttcagaggctcatagcaccctcctgtgctgcagcctttctcacctggaagatatctcctcc

SEQ ID NO: 23 - DNA, 864 bp, synthetic construct
  source 1..864: mol_type = other DNA
gcagctgtcgacctgagttatatgcacaagatcctggaatattttcattatcctggagacactgtgttactaataactctgtatttgttcctgccagtacttactctctcctgtggcccctcattgtccttgctcctttagaagtggcccaagttggtttttctcacttctcagagctccctcttctgttgctttggtgaagtgctgggaaacttggctgcttctctctctgttacccactcacaacccttccttccctggtctcttgttttgacactgctcaaactggacccccactttaagcagtttctccaggatgtggggttctctcccaaagggagctatggcccattgatgtgccatttctcttatagtacactattgtaagccccctgggagctcacagagaccctctcccaccatcccactatttcaaagggcagcagctgtgccatcctttcaggatgagcagctactctgcctggcttttcagtggacactttggctgtttgagagttcttttatcttcagggctgtctcctttctgttcttctctcctggatatttctcttcctttgctccagcaattggtgaaactgtacaagattttataaatccttagtttgtatatattttaacccagtacatagcatataaaatagccaggagcttgaataaaatgaatattagaagctgttagaataagagaaaatgacagaggaaaactgaaagggagaactgaaagtgggaaattcctctgaggcagaaaggaccatcccttataaatagcacaggccatgaaggaagatcattctcactgcagcctttgacagcctttgcctcatcttgcagatatcagccgac

SEQ ID NO: 24 - DNA, 651 bp, synthetic construct
  source 1..651: mol_type = other DNA
gtcgacactctgtctcaaaaataatatcaatagtaataatggtaatacaaacaaaaatactgataaatctcaaaaacattatcttgaatgaaagaagccagaaacaaaggaatatatattgtataatctcatttacattaagtttaatacaggcaaaattaatgtataaagccagaaatcagagtaacatttgcctgagaggagtacagaagtagactggaaaagtgctcaagggaacttgttagggtgatgaaaatgtgctatatcttgtttgggatgtttattacatgggtttacacatttgtcaaaactcatcaaactttacactaaaatctgtagaacttattgtatgtaattctcaattcaaaacagaaaaaaatacaaaatagattttatttaaatctaatttactctcagactattcaagttctgatccaaattaaataagttgaatttgagagtatttactctatttccacaggtgttgagagagataccctctcagactttacacagctaccaaggcaacaatgccaggaaaactattaatcaagatatgatagttcctgtttgcaatcaggagaagaaagcaaagaacactcaggattataaaagcagatgagacctacccactagacctggtcagatatc

SEQ ID NO: 25 - DNA, 712 bp, synthetic construct
  source 1..712: mol_type = other DNA
gtcgactccatgattgtaagtttcctgaggcctccccatcctcaggaaagtctgtgagtcaattaaactatgagtcaattaaacctctttcctttttaagttacccagtctctggtattatctttatagcagtatgaaaaggactaatacaccttgccttctgaagtaggtcttgagaggttcctgaacctgaaagggaatggagaaatgacttaaagccaccagctaattgggcttaatcatttggactcagttgactcttcccctacccctacccatgcctaaaccaaagaaaggatcatcccacatttacctagcacaaagaaatctactcttctgctctttctaggactgctaaaggccatgggaactggacacctggatgctgcagaggaagggcaaagctcaacatcaacttggacagtttgccaacctgtttgtggtaagttgatgtcatttgtgaccactcctaatgtgtgccaggaataagctattcctgatgccagaatctcttactgtcagtgccctctgtaggccttctgatccttactccttgctccacccattgtttatatcatgtagttctctctcagaccctgatataaagctcctactctgtctgacctgacaagccacctcaagtggacaaggcacttaccaacaggtaaaggggcattacaggagaagaggatatctgaagctcgagggctcg

SEQ ID NO: 26 - DNA, 694 bp, synthetic construct
  source 1..694: mol_type = other DNA
gctacgtcgaccaggctggtcttgaactactgttttaaaattctatataggcaatgtatgctaatgtggatgactgctagctaccctgtcattggtatgccacagatgaatagtaaactgataatgttcatttaaattccaatacaatgtgttgagagcttaactgctgctgattattacatgatatttaggtcagaagaactctgatgattgaatggaagtgggctttgagcatgtacccagactttattatacagttaatttccctagaggtgttaaatttcagtttttggtctagaagctgtaagaatattcaaatttgagagaatacatatttgttttttacaagctcatcatcttatgtatcctaatactatgccaaatgttttcttgggattgaataaatgtaatttttttaacttggcctctgttgattcattggatgtttgttactttgaatataaaagcagaacttggcaagtcatacaactcaatttggcagatcactcactcttagcaaatgaactgtgcccaacataaatccactctaaagtttacagaggttcagttctgtaccaatggaaatgagaagttagctaagagtacaagaagcatgctgattggctgatgcagggtaagcaggctacataaaaggcagctgtagaacatctgggaaggtcaatgatatcatctg

SEQ ID NO: 27 - DNA, 15 bp, synthetic construct
  source 1..15: mol_type = other DNA
ggtggaggaggtagt

SEQ ID NO: 28 - DNA, 30 bp, synthetic construct
  source 1..30: mol_type = other DNA
ggtggaggaggtagtgggggtggaggttca

SEQ ID NO: 29 - DNA, 416 bp, synthetic construct
  source 1..416: mol_type = other DNA
ttaattaaaattatctctaaggcatgtgaactggctgtcttggttttcatctgtacttcatctgctacctctgtgacctgaaacatatttataattccattaagctgtgcatatgatagatttatcatatgtattttccttaaaggatttttgtaagaactaattgaattgatacctgtaaagtctttatcacactacccaataaataataaatctctttgttcagctctctgtttctataaatatgtaccagttttattgtttttagtggtagtgattttattctctttctatatatatacacacacatgtgtgcattcataaatatatacaatttttatgaataaaaaattattagcaatcaatattgaaaaccactgatttttgtttatgtgagcaaacagcagattaaaagg

SEQ ID NO: 30 - DNA, 1048 bp, synthetic construct
  source 1..1048: mol_type = other DNA
gagccccactgtgttcatcttacagatggaaatactgacattcagaggagttagttaacttgcctaggtgattcagctaataagtgcaagaaagatttcaatccaaggtgatttgattctgaagcctgtgctaatcacattacaccaagctacaacttcatttataaataataagtcagctttcaagggcctttcaggtgtcctgcacttctacaagctgtgccatttagtgaacacaaaatgagccttctgatgaagtagtcttttcattatttcagatattagaacactaaaattcttagctgccagctgattgaaggctgggacaaaattcaaacatgcatctacaacaatatatatctcaatgttagtctccaaattctattgacttcaactcaagagaatataaagagctagtctttatacactctttaaggtatgatatcatctggaaagtaacaaaattgatgcaaatttgaatgaactttatcatggtgtatttacacaatgtgtttcttctccctgcaatgtatttctttctctaattccttccatttgatctttcatacacaatctggttctgatgtatgttttttggatgcacttttcaactccaaaagacagagctagttactttcttcctggtgctccaagcactgtatttgtatctgtattcaagccctttgcaatattgtactggatcattatttcacctctaggatggcttccccaggcaacttgtgttcacccagagactacattttgtatcttgttgacctttgaacttccaccagtgtctaaaaataatatgtatgcaaaattacttgctatgagaatgtataattaaacaatataaaaaggagaagcaaggagagaaacacaggtgtgtatttgtgtttgtgtgcttaaaaggcagtgtggaaaaggaagaaatgccatttatagtgaggagacaaagttatattacctcttatctggcttttaaggagattttgctgagctaaaaatcctatattcatagaaaagccttacctgagttgccaatacc

SEQ ID NO: 31 - DNA, 800 bp, synthetic construct
  source 1..800: mol_type = other DNA
agtcaatatgttcaccccaaaaaagctgtttgttaacttgtcaacctcattctaaaatgtatatagaagcccaaaagacaataacaaaaatattcttgtagaacaaaatgggaaagaatgttccactaaatatcaagatttagagcaaagcatgagatgtgtggggatagacagtgaggctgataaaatagagtagagctcagaaacagacccattgatatatgtaagtgacctatgaaaaaaatatggcattttacaatgggaaaatgatggtctttttcttttttagaaaaacagggaaatatatttatatgtaaaaaataaaagggaacccatatgtcataccatacacacaaaaaaattccagtgaattataagtctaaatggagaaggcaaaactttaaatcttttagaaaataatatagaagcatgccatcaagacttcagtgtagagaaaaatttcttatgactcaaagtcctaaccacaaagaaaagattgttaattagattgcatgaatattaagacttatttttaaaattaaaaaaccattaagaaaagtcaggccatagaatgacagaaaatatttgcaacaccccagtaaagagaattgtaatatgcagattataaaaagaagtcttacaaatcagtaaaaaataaaactagacaaaaatttgaacagatgaaagagaaactctaaataatcattacacatgagaaactcaatctcagaaatcagagaactatcattgcatatacactaaattagagaaatattaaaaggctaagtaacatctgtggc

SEQ ID NO: 32 - DNA, 446 bp, synthetic construct
  source 1..446: mol_type = other DNA
aaaacaaatgacatcattcctgattataataattttaattgtgctttacaagtagaattctacttgtaaagagagtttaatttgaaaaacaaattagtcattattaaacatgttaacaattgtgtataaaaatgacatcagtttaatgatgacatcatctcttgattatgttttacaagtagaattctacttgtaaagctggttcagttttgaaaaacaaatgacatcatctcttgattatgttttacaagtagaattctacttgtaaaagtgagtttagttttaaaaaacaaatgacatcattcagttttgaaaaacaaatgacatcatctcttgattgtgttttacaagtagaattctacttgtaaagtgagttcagttttgaaaaacaaatgaccctctcatacaattgttgaacaattttaataaataatctttacaagatt

SEQ ID NO: 33 - DNA, 931 bp, synthetic construct
  source 1..931: mol_type = other DNA
tcctgcagttaaggaagccctgggcctgctgttctcatccactgagctcttctgccctggagaagcccacttgttagcttattacagttcatggacaccaggtccacaatgtaagctaacagaaactatgtctgctttcccatccgtctcagtgacatggagggggggggggggccactggcgatcctcaagacccaaaccatcctgaggatttggttccatttggctctccctagcagctgcacttgcaggaagaacagctcagctcacactgcctctcctctggcctcactgtgctcaaaggacaggcctcaggccacaggaggctttgtgcactgcgccgagtggagcagtggagcgtctgggaaaagttgcaaaccgagctggaagacttgcttggatgagaaactggcgtaggaccgagtctgtttgccccatcaagctggccaggccagatccaccttcctgccccacagatggggaaggctcctacccattgttctccaggatgctttgacagagaggaaagggaatgtaggccctggagaccggaaggttcagcttccgggcaccaagctctgccagactcacgcctgccctccagacaggaaggcaggtccttggtctcattctgtcctgcccagctgctggaccacccccaatcaatgctttcccctttctgggcccttaaggagacggcatacaggaggctttgtctgtgtgctagcctgggaagggaattccagaggaattgaggagaataatgcccaagatttggggctccctggtcccagctataccattcagtgtaccattacactccaagtactgcatatggccacagaaataccttgtatgctctgtggctggcctcacacattcacattatcagacaaatgccatgtgcacaatcttagttccatatacactc

SEQ ID NO: 34 - DNA, 807 bp, synthetic construct
  source 1..807: mol_type = other DNA
agtgatcctcaacttctgggtcttgatccctttgggggctgaacaaccaattaacaggggtaacctacgagcatcagaaaacatagatctttacattatgattcatagcagtagcaaaatgacagctatgaagtagcaacgaaatacttctatggttgggggtcaccacaacatgaaatatggtactaagggatcgtggctttaggaaggttgagaaagccgatcccagccagtccttgtcaggctctgcgctgagccttttcagcctggactttccagcttcagggtccttggtcctctggcaccacttcctcaacaacattgaaaggatgtctgagagaaagcaagacagctgggaaagtgctctcagaggagctagtccccctccgctctaatggccattgttctcaccaccaggaatgcagttcttgctctgctccttcctggcctgggacagactgcccaacacccctcttcctcctcaggctcctgaggctgcagcgttaactgccttagcctctggcctcttcggtggtcaagatcatgccccatccccccaccctgctcgctctcgagagtgtgccttcgctctctcgctctctcgtgttctctctctctctctctctctctctctctctctctcacacacacacacacacacacacacacacacaaaaccaccccatgggggatcaaaacctacacaggacaatcttcctaaaacagaacctcttagtttgagcccatggtttcaaagctgcttgggggacatcaggccacctctctgacaatacctagtatgaaagc

SEQ ID NO: 35 - DNA, 1356 bp, synthetic construct
  source 1..1356: mol_type = other DNA
atctgcatttccaactcctctctccaccctaatgatcctgaggcttgaggaccatgctcattaaaaaaatatatttatttttattgtatgcatattggtattttgcctctctatacatctgtgcaaccatgggcatgcagtgcaggagggagccagaagatggcattagatcctctggaaccagagctacagacacctatttgtggccagaaaggtactagtagcagaaacaaggtcctctggaagagcaactgatgctcttaggtactgaagcatcatcctgccccagagaccactcgcatatgaagcacacatattcagtctgccttacttgtgttaatgattgccagtgtccctctgacctcctagccctgaaaagtgtggcctgaaggtcatttcagagacggggagagctgctcagagaagccaatcggcgagtctaggacacacagacaggatctagtcccagagttcgctagcctaggtgagcgtcccctggccccttataccacttccttctccagcttgcatctaatctgctctggcagaccatcgtgtttcctgtcttcctggcagcctccagcacgctcagtgctactccctgcgcatgcgccctcctcccagtaccttctctgactccagtgggcttggagtgcgaggaggaagggtgaggaaggggtgaaatcaggtattggatccacagggggtctgaagagcactagcctggccttttgggactgaacttctgctatgaagacctccactgccatccctggagtccggggcacatccaaggcttgcctgtccatcgtttactgtttacagatgacaacaatgactgtgttcggggcagaaatatccaccagggctagagtacaaaaggagtttgcattgatggccggacaggccctgtccctggcagcctgccagcgctgagtatgagacccagcgggaagtgctaccctggcagacgtgtccactgagtacacagaccaccaaggcaggcagctctcggggaagctgtctatgctgggccagcccaccttgagggcagggaacagaacagattgtggcagagaggaaaatgtggagcttctgtttgttcacagacacacgcactcgcccacgcacgcacgcacgcacgcacgcacgcacgaatgcacgcacgcagtagttgaatgctatggattccgctcagagctgagaacagccccagcgacagttccctggcctctctccttactctgatgtcctcatctgtcttcacatggtctcaggacgctaatactccatcctaatgtacactcctttccctgggcctccgttccagttcagttctcagaggacctggaggga

SEQ ID NO: 36 - DNA, 1055 bp, synthetic construct
  source 1..1055: mol_type = other DNA
tcattatccgcatcaccactaccatcaccatttctactttacaggcagtggtgcttaggtttgaggaagtcacccacaagaagattgtagaagtgggaccccgttcttcagcagcagcctcagccccactcctgagcaggtcctgtgacaactcatctccctgctggtcctggggagtggggaagggaccccatcactgacactgtcttgttcccaaccggtaagagtcaggggttctgcccaccatctggagaccttcgcataggtccagattcgagctctttcttttaagcacagggtgttctcttccacgttatctgtctgcgtgggccacaaacccggtttataaacaaggcaaaaaatggcaagaggaaaaagtgaagtcagcctgtgccattggagcaagtcaaacaataccaagctcgtagctggctaagtggctgtctcattgtccagatatttcctcaggccattaaacaagcgaggaatgattgccaggtttgatttcaggaaggaagcccctcccatttccctgccgagcaattcagtgttcattttcttctgacccacgctggctggttattagggaagcgctgcatgcttctttcataaacaaaagttatttgcttcaagattcaaaattcacttctcaacgactgggaagccctgagttcctgccagatggttttattattttggaggtagggctagcccaagtactgggagcaccctgcgaccagagtagactttgggggctgagggaaagccattctgccactggcctggagttcagagcctttgtccagagagcccctttgggtggaagacaaagtaactaggttggttcggcaaagttccgacggctggcccgcagccctgccttgggtggccacagatacacacggccatgggaacagccagtgaacttttttttttttttttcttaatcagggtcctactctgcctgtggagcaagcttgtcattattctcacctcttgggagacagtcactttttttttttttccttttgagacaaggtttctctgtgtaacag

SEQ ID NO: 37 - DNA, 426 bp, synthetic construct
  source 1..426: mol_type = other DNA
ggggtgggggcgggggtaggggaggagcagggtgcagctgctcactgcccttccccctctcatgtctccttggcagcagctgcctgctaaagactagcccaggccaggagctgtttgtctctgcttgtcagaggcgtttcctgatgggtctctattttggtttctgtttttctctgtgctaacagagaaagagacggctccaacgtcatggggttttcccagcaattagcctcggagcaaacagacagcaaatcgggatttaatgagttccttcccgtcctcctccatccgcagtgaccacttggtgagctgccagccagggttagatctggacccggtccccatagcctcctccaattgtgtaggatgagagaccttgagaacaggggaccaggctggcaggcactagctcatatttagtcatca

SEQ ID NO: 38 - DNA, 85 bp, synthetic construct
  source 1..85: mol_type = other DNA
aggggccaagtccatacgacaggccccagcccgccagacggagggccgcagaaaggaaggagacacgaccgccccagaaggagga

SEQ ID NO: 39 - DNA, 85 bp, synthetic construct
  source 1..85: mol_type = other DNA
agggccaaggaacatacacacccaacagaacccagaccccggcccacggcgccgcgcccccaacccccgacaaccagagggagcc

SEQ ID NO: 40 - DNA, 207 bp, synthetic construct
  source 1..207: mol_type = other DNA
gccgggtacatctcttgctcggggtcgccgtcctacacattgttgttgtgacgtgcggcccagattcgaatctgtaataaaacctttttttttctgaatcctcagattggcagtgagaggagattttgttcgtggtgttggctcgcctactgggtgggcgcagggatccggactgaatccgtagtacttcggtacaacatttggggg

SEQ ID NO: 41 - DNA, 165 bp, synthetic construct
  source 1..165: mol_type = other DNA
ggtcgccgtcctacacattgttgttgtgacgtgcggcccagattcgaatctgtataaaacttttttttttctgaatcctcagattggcagtgagaggagattttgttcgtggtgttggctcgcctactgggtgggcgcagggatccggactgaatccgtagtact

SEQ ID NO: 42 - protein, 44 aa, synthetic construct
GRYLTQETNKVETYKEQPLKTPGKKKKGKPGKRKEQEKKKRRTR

SEQ ID NO: 43 - DNA, 132 bp, synthetic construct
  source 1..132: mol_type = other DNA
ggcagatacctgacacaagagacaaacaaggtggaaacctacaaagagcagcccctgaaaaccccaggcaagaagaagaagggcaagcctggaaagaggaaagaacaagagaaaaagaagagaaggaccaga

SEQ ID NO: 44 - protein, 56 aa, synthetic construct
GRYLTQETNKVETYKEQPLKTPGKKKKGKPGKRKEQEKKKRRTRDRDDQAAWFSQY

SEQ ID NO: 45 - DNA, 168 bp, synthetic construct
  source 1..168: mol_type = other DNA
ggcagatacctgacacaagagacaaacaaggtggaaacctacaaagagcagcccctgaaaaccccaggcaagaagaagaagggcaagcctggaaagaggaaagaacaagagaaaaagaagagaaggaccagagacagggatgaccaggctgcttggttttctcagtac

SEQ ID NO: 46 - DNA, 4131 bp, synthetic construct
  source 1..4131: mol_type = other DNA
cactatgtggacatgaattcaattggctagcaggagtcaatgggaaaaacccattggagccaagtacactgactcaatagggactttccattgggttttgcccagtacataaggtcaatagggggtgagtcaacaggaaagtcccattggagccaagtacattgagtcaatagggactttccaatgggttttgcccagtacataaggtcaatgggaggtaagccaatgggtttttcccattactgacatgtatactgagtcattagggactttccaatgggttttgcccagtacataaggtcaataggggtgaatcaacaggaaagtcccattggagccaagtacactgagtcaatagggactttccattgggttttgcccagtacaaaaggtcaatagggggtgagtcaatgggtttttcccattattggcacatacataaggtcaataggggtgactagtggagaagagcatgcttgagggctgagtgcccctcagtgggcagagagcacatggcccacagtccctgagaagttggggggaggggtgggcaattgaactggtgcctagagaaggtggggcttgggtaaactgggaaagtgatgtggtgtactggctccacctttttccccagggtgggggagaaccatatataagtgcagtagtctctgtgaacattcaagcttctgccttctccctcctgtgagtttggtaagtcactgactgtctatgcctgggaaagggtgggcaggagatggggcagtgcaggaaaagtggcactatgaaccctgcagccctagacaattgtactaaccttcttctctttcctctcctgacaggttggtaaccaagccaccatgcagctgagaaaccctgagctgcacctgggctgtgctctggccctgagatttctggctctggtgtcctgggacatccctggtgctagagccctggataatggcctggccagaacacctacaatgggctggctgcactgggagagattcatgtgcaacctggactgccaagaggaacctgacagctgcatctctgagaagctgttcatggaaatggctgagctgatggtgtctgaaggctggaaggatgctggctatgagtacctgtgcattgatgactgctggatggcccctcagagagactctgaaggcagactccaggctgaccctcagaggttccctcatggcatcagacagctggccaactatgtgcacagcaagggcctgaagctgggcatctatgctgatgtgggcaacaagacctgtgctggcttccctggcagctttggctactatgacattgatgcccagacctttgctgactggggagttgacctgctgaagtttgatggctgctactgtgacagcctggaaaacctggctgatggctacaagcacatgagcctggctctgaacagaacaggcagatccattgtgtacagctgtgaatggcccctgtacatgtggcccttccagaagcctaactacacagagatcagacagtactgcaaccattggaggaactttgctgatattgatgatagctggaagtccatcaagagcatcctggactggaccagcttcaatcaagaaaggattgtggatgtggctggccctggtggctggaatgaccctgacatgctggtcattggcaactttggcctgagctggaaccagcaagtgacccagatggccctgtgggccattatggctgcccctctgttcatgagcaatgacctgagacacatcagccctcaggctaaggccctgctccaggacaaggatgtgattgctatcaatcaggaccctctgggcaagcagggctaccagcttagacagggagacaactttgaagtgtgggaaagacccctgtctggcctggcttgggctgttgccatgatcaacagacaagagattggaggccccaggtcctacaccattgctgtggccagccttggcaaaggggttgcctgtaatcctgcctgcttcatcacccagctgctgcctgtgaagagaaagctgggcttttatgagtggaccagcagactgagaagccacatcaaccccacaggcacagtgctgctgcaactggaaaacacaatgcagatgtccctgaaggacctgctgagaaacacaggcagaggtggagaggaaaagaagaaagagaaagaaaaagaggaacaagaggaaagggaaactaagacccctgagtgccccagccacacacagcctctgggagtgttcctgtttcctccaaagccaaaggacaccctgatgatcagcagaacccctgaagtgacctgtgtggtggtggatgtgtcccaagaggacccagaggtgcagttcaattggtatgtggatggtgttgaggtgcacaatgccaagaccaagcctagagaggaacagttcaacagcacctacagagtggtgtctgtgctgacagtgctgcaccaggactggctgaatggcaaagagtacaagtgcaaggtgtccaacaagggcctgcctagcagcattgaaaagaccatcagcaaggccaagggccagccaagagaaccccaggtgtacacactgcctccaagccaagaagagatgaccaagaaccaggtgtccctgacctgcctggtcaagggcttctacccctctgacattgctgtggaatgggagagcaatggccagcctgagaacaactacaagaccacacctcctgtgctggactctgatggctcattcttcctgtacagcagactgacagtggacaagagcagatggcaagagggcaatgtgttcagctgctctgtgatgcatgaggccctgcacaaccactacacccagaagtctctgagcctgagcctgggcaaatgaagatctacttctggctaataaaagatcagagctctagtgatctgtgtgttggttttttgtgtctgcattctagctctagtgatcagcagttcaacctgttgatagtatgtactaagctctcatgtttaatgtactaagctctcatgtttaatgaactaaaccctcatggctaatgtactaagctctcatggctaatgtactaagctctcatgtttcatgtactaagctctcatgtttgaacaataaaattaatataaatcagcaacttaaatagcctctaaggttttaagttttataagaaaaaaaagaatatataaggcttttaaaggttttaaggtttcctaggttatcctcatatgagctcttagaaaaactcatccagcatcaaatgaaactgcaatttattcatatcaggattatcaataccatatttttgaaaaagtcttttctgtaatgaaggagaaaactcacccaggcagttccataggatggcaagatcctggtatctgtctgcaattccaactcttccaacatcaatacaacctattaatttcccctcatcaaaaataaggttatcaagtgagaaatcaccatgagtgaccactgaatctggtgagaatggcaaaagattatgcatttctttccagacttgttcaacaggccagccatttctctcatcatcaaaatcactggcatcaaccaaaccattattcattcttgattgggcctgagccagtctaaatactctatcagagttaaaaggacaattacaaacaggaatggaatgcaatcttctcaggaacactgccagggcatcaacaatattttcacctgaatcaggatattcttccaatacctggaatgctgttttccctgggatggcagtggtgagtaaccatgcatcatcaggagttctgataaaatgcttgatggttggaagaggcataaattcagtcagccagtttagtctgaccatctcatctgtaacatcattggcaacagaacctttgccatgtttcagaaacaactctggggcatctggcttcccatacaatctatagattgtggcacctgattgcccaacattatctctagcccatttatacccatataaatcagcatccatgttggaatttaatcttggcctggagcaagaggtttctctttgaatatggctcatacatgtgcacctcctatagtgagttgtattatactatgcagatatactatgccaatgtttaattgtcag

SEQ ID NO: 47 - DNA, 4161 bp, synthetic construct
  source 1..4161: mol_type = other DNA
cactatgtggacatgaattcaattggctagcaggagtcaatgggaaaaacccattggagccaagtacactgactcaatagggactttccattgggttttgcccagtacataaggtcaatagggggtgagtcaacaggaaagtcccattggagccaagtacattgagtcaatagggactttccaatgggttttgcccagtacataaggtcaatgggaggtaagccaatgggtttttcccattactgacatgtatactgagtcattagggactttccaatgggttttgcccagtacataaggtcaataggggtgaatcaacaggaaagtcccattggagccaagtacactgagtcaatagggactttccattgggttttgcccagtacaaaaggtcaatagggggtgagtcaatgggtttttcccattattggcacatacataaggtcaataggggtgactagtggagaagagcatgcttgagggctgagtgcccctcagtgggcagagagcacatggcccacagtccctgagaagttggggggaggggtgggcaattgaactggtgcctagagaaggtggggcttgggtaaactgggaaagtgatgtggtgtactggctccacctttttccccagggtgggggagaaccatatataagtgcagtagtctctgtgaacattcaagcttctgccttctccctcctgtgagtttggtaagtcactgactgtctatgcctgggaaagggtgggcaggagatggggcagtgcaggaaaagtggcactatgaaccctgcagccctagacaattgtactaaccttcttctctttcctctcctgacaggttggtaaccaagccaccatgcagctgagaaaccctgagctgcacctgggctgtgctctggccctgagatttctggctctggtgtcctgggacatccctggtgctagagccctggataatggcctggccagaacacctacaatgggctggctgcactgggagagattcatgtgcaacctggactgccaagaggaacctgacagctgcatctctgagaagctgttcatggaaatggctgagctgatggtgtctgaaggctggaaggatgctggctatgagtacctgtgcattgatgactgctggatggcccctcagagagactctgaaggcagactccaggctgaccctcagaggttccctcatggcatcagacagctggccaactatgtgcacagcaagggcctgaagctgggcatctatgctgatgtgggcaacaagacctgtgctggcttccctggcagctttggctactatgacattgatgcccagacctttgctgactggggagttgacctgctgaagtttgatggctgctactgtgacagcctggaaaacctggctgatggctacaagcacatgagcctggctctgaacagaacaggcagatccattgtgtacagctgtgaatggcccctgtacatgtggcccttccagaagcctaactacacagagatcagacagtactgcaaccattggaggaactttgctgatattgatgatagctggaagtccatcaagagcatcctggactggaccagcttcaatcaagaaaggattgtggatgtggctggccctggtggctggaatgaccctgacatgctggtcattggcaactttggcctgagctggaaccagcaagtgacccagatggccctgtgggccattatggctgcccctctgttcatgagcaatgacctgagacacatcagccctcaggctaaggccctgctccaggacaaggatgtgattgctatcaatcaggaccctctgggcaagcagggctaccagcttagacagggagacaactttgaagtgtgggaaagacccctgtctggcctggcttgggctgttgccatgatcaacagacaagagattggaggccccaggtcctacaccattgctgtggccagccttggcaaaggggttgcctgtaatcctgcctgcttcatcacccagctgctgcctgtgaagagaaagctgggcttttatgagtggaccagcagactgagaagccacatcaaccccacaggcacagtgctgctgcaactggaaaacacaatgcagatgtccctgaaggacctgctgggtggaggaggtagtgggggtggaggttcaagaaacacaggcagaggtggagaggaaaagaagaaagagaaagaaaaagaggaacaagaggaaagggaaactaagacccctgagtgccccagccacacacagcctctgggagtgttcctgtttcctccaaagccaaaggacaccctgatgatcagcagaacccctgaagtgacctgtgtggtggtggatgtgtcccaagaggacccagaggtgcagttcaattggtatgtggatggtgttgaggtgcacaatgccaagaccaagcctagagaggaacagttcaacagcacctacagagtggtgtctgtgctgacagtgctgcaccaggactggctgaatggcaaagagtacaagtgcaaggtgtccaacaagggcctgcctagcagcattgaaaagaccatcagcaaggccaagggccagccaagagaaccccaggtgtacacactgcctccaagccaagaagagatgaccaagaaccaggtgtccctgacctgcctggtcaagggcttctacccctctgacattgctgtggaatgggagagcaatggccagcctgagaacaactacaagaccacacctcctgtgctggactctgatggctcattcttcctgtacagcagactgacagtggacaagagcagatggcaagagggcaatgtgttcagctgctctgtgatgcatgaggccctgcacaaccactacacccagaagtctctgagcctgagcctgggcaaatgaagatctacttctggctaataaaagatcagagctctagtgatctgtgtgttggttttttgtgtctgcattctagctctagtgatcagcagttcaacctgttgatagtatgtactaagctctcatgtttaatgtactaagctctcatgtttaatgaactaaaccctcatggctaatgtactaagctctcatggctaatgtactaagctctcatgtttcatgtactaagctctcatgtttgaacaataaaattaatataaatcagcaacttaaatagcctctaaggttttaagttttataagaaaaaaaagaatatataaggcttttaaaggttttaaggtttcctaggttatcctcatatgagctcttagaaaaactcatccagcatcaaatgaaactgcaatttattcatatcaggattatcaataccatatttttgaaaaagtcttttctgtaatgaaggagaaaactcacccaggcagttccataggatggcaagatcctggtatctgtctgcaattccaactcttccaacatcaatacaacctattaatttcccctcatcaaaaataaggttatcaagtgagaaatcaccatgagtgaccactgaatctggtgagaatggcaaaagattatgcatttctttccagacttgttcaacaggccagccatttctctcatcatcaaaatcactggcatcaaccaaaccattattcattcttgattgggcctgagccagtctaaatactctatcagagttaaaaggacaattacaaacaggaatggaatgcaatcttctcaggaacactgccagggcatcaacaatattttcacctgaatcaggatattcttccaatacctggaatgctgttttccctgggatggcagtggtgagtaaccatgcatcatcaggagttctgataaaatgcttgatggttggaagaggcataaattcagtcagccagtttagtctgaccatctcatctgtaacatcattggcaacagaacctttgccatgtttcagaaacaactctggggcatctggcttcccatacaatctatagattgtggcacctgattgcccaacattatctctagcccatttatacccatataaatcagcatccatgttggaatttaatcttggcctggagcaagaggtttctctttgaatatggctcatacatgtgcacctcctatagtgagttgtattatactatgcagatatactatgccaatgtttaattgtcag

SEQ ID NO: 48 - DNA, 4176 bp, synthetic construct
  source 1..4176: mol_type = other DNA
cactatgtggacatgaattcaattggctagcaggagtcaatgggaaaaacccattggagccaagtacactgactcaatagggactttccattgggttttgcccagtacataaggtcaatagggggtgagtcaacaggaaagtcccattggagccaagtacattgagtcaatagggactttccaatgggttttgcccagtacataaggtcaatgggaggtaagccaatgggtttttcccattactgacatgtatactgagtcattagggactttccaatgggttttgcccagtacataaggtcaataggggtgaatcaacaggaaagtcccattggagccaagtacactgagtcaatagggactttccattgggttttgcccagtacaaaaggtcaatagggggtgagtcaatgggtttttcccattattggcacatacataaggtcaataggggtgactagtggagaagagcatgcttgagggctgagtgcccctcagtgggcagagagcacatggcccacagtccctgagaagttggggggaggggtgggcaattgaactggtgcctagagaaggtggggcttgggtaaactgggaaagtgatgtggtgtactggctccacctttttccccagggtgggggagaaccatatataagtgcagtagtctctgtgaacattcaagcttctgccttctccctcctgtgagtttggtaagtcactgactgtctatgcctgggaaagggtgggcaggagatggggcagtgcaggaaaagtggcactatgaaccctgcagccctagacaattgtactaaccttcttctctttcctctcctgacaggttggtaaccaagccaccatgcagctgagaaaccctgagctgcacctgggctgtgctctggccctgagatttctggctctggtgtcctgggacatccctggtgctagagccctggataatggcctggccagaacacctacaatgggctggctgcactgggagagattcatgtgcaacctggactgccaagaggaacctgacagctgcatctctgagaagctgttcatggaaatggctgagctgatggtgtctgaaggctggaaggatgctggctatgagtacctgtgcattgatgactgctggatggcccctcagagagactctgaaggcagactccaggctgaccctcagaggttccctcatggcatcagacagctggccaactatgtgcacagcaagggcctgaagctgggcatctatgctgatgtgggcaacaagacctgtgctggcttccctggcagctttggctactatgacattgatgcccagacctttgctgactggggagttgacctgctgaagtttgatggctgctactgtgacagcctggaaaacctggctgatggctacaagcacatgagcctggctctgaacagaacaggcagatccattgtgtacagctgtgaatggcccctgtacatgtggcccttccagaagcctaactacacagagatcagacagtactgcaaccattggaggaactttgctgatattgatgatagctggaagtccatcaagagcatcctggactggaccagcttcaatcaagaaaggattgtggatgtggctggccctggtggctggaatgaccctgacatgctggtcattggcaactttggcctgagctggaaccagcaagtgacccagatggccctgtgggccattatggctgcccctctgttcatgagcaatgacctgagacacatcagccctcaggctaaggccctgctccaggacaaggatgtgattgctatcaatcaggaccctctgggcaagcagggctaccagcttagacagggagacaactttgaagtgtgggaaagacccctgtctggcctggcttgggctgttgccatgatcaacagacaagagattggaggccccaggtcctacaccattgctgtggccagccttggcaaaggggttgcctgtaatcctgcctgcttcatcacccagctgctgcctgtgaagagaaagctgggcttttatgagtggaccagcagactgagaagccacatcaaccccacaggcacagtgctgctgcaactggaaaacacaatgcagatgtccctgaaggacctgctgggaggaggtggatcaggtggaggaggtagtgggggtggaggttcaagaaacacaggcagaggtggagaggaaaagaagaaagagaaagaaaaagaggaacaagaggaaagggaaactaagacccctgagtgccccagccacacacagcctctgggagtgttcctgtttcctccaaagccaaaggacaccctgatgatcagcagaacccctgaagtgacctgtgtggtggtggatgtgtcccaagaggacccagaggtgcagttcaattggtatgtggatggtgttgaggtgcacaatgccaagaccaagcctagagaggaacagttcaacagcacctacagagtggtgtctgtgctgacagtgctgcaccaggactggctgaatggcaaagagtacaagtgcaaggtgtccaacaagggcctgcctagcagcattgaaaagaccatcagcaaggccaagggccagccaagagaaccccaggtgtacacactgcctccaagccaagaagagatgaccaagaaccaggtgtccctgacctgcctggtcaagggcttctacccctctgacattgctgtggaatgggagagcaatggccagcctgagaacaactacaagaccacacctcctgtgctggactctgatggctcattcttcctgtacagcagactgacagtggacaagagcagatggcaagagggcaatgtgttcagctgctctgtgatgcatgaggccctgcacaaccactacacccagaagtctctgagcctgagcctgggcaaatgaagatctacttctggctaataaaagatcagagctctagtgatctgtgtgttggttttttgtgtctgcattctagctctagtgatcagcagttcaacctgttgatagtatgtactaagctctcatgtttaatgtactaagctctcatgtttaatgaactaaaccctcatggctaatgtactaagctctcatggctaatgtactaagctctcatgtttcatgtactaagctctcatgtttgaacaataaaattaatataaatcagcaacttaaatagcctctaaggttttaagttttataagaaaaaaaagaatatataaggcttttaaaggttttaaggtttcctaggttatcctcatatgagctcttagaaaaactcatccagcatcaaatgaaactgcaatttattcatatcaggattatcaataccatatttttgaaaaagtcttttctgtaatgaaggagaaaactcacccaggcagttccataggatggcaagatcctggtatctgtctgcaattccaactcttccaacatcaatacaacctattaatttcccctcatcaaaaataaggttatcaagtgagaaatcaccatgagtgaccactgaatctggtgagaatggcaaaagattatgcatttctttccagacttgttcaacaggccagccatttctctcatcatcaaaatcactggcatcaaccaaaccattattcattcttgattgggcctgagccagtctaaatactctatcagagttaaaaggacaattacaaacaggaatggaatgcaatcttctcaggaacactgccagggcatcaacaatattttcacctgaatcaggatattcttccaatacctggaatgctgttttccctgggatggcagtggtgagtaaccatgcatcatcaggagttctgataaaatgcttgatggttggaagaggcataaattcagtcagccagtttagtctgaccatctcatctgtaacatcattggcaacagaacctttgccatgtttcagaaacaactctggggcatctggcttcccatacaatctatagattgtggcacctgattgcccaacattatctctagcccatttatacccatataaatcagcatccatgttggaatttaatcttggcctggagcaagaggtttctctttgaatatggctcatacatgtgcacctcctatagtgagttgtattatactatgcagatatactatgccaatgtttaattgtcag

SEQ ID NO: 49 - protein, 674 aa, synthetic construct
MQLRNPELHLGCALALRFLALVSWDIPGARALDNGLARTPTMGWLHWERFMCNLDCQEEPDSCISEKLFMEMAELMVSEGWKDAGYEYLCIDDCWMAPQRDSEGRLQADPQRFPHGIRQLANYVHSKGLKLGIYADVGNKTCAGFPGSFGYYDIDAQTFADWGVDLLKFDGCYCDSLENLADGYKHMSLALNRTGRSIVYSCEWPLYMWPFQKPNYTEIRQYCNHWRNFADIDDSWKSIKSILDWTSFNQERIVDVAGPGGWNDPDMLVIGNFGLSWNQQVTQMALWAIMAAPLFMSNDLRHISPQAKALLQDKDVIAINQDPLGKQGYQLRQGDNFEVWERPLSGLAWAVAMINRQEIGGPRSYTIAVASLGKGVACNPACFITQLLPVKRKLGFYEWTSRLRSHINPTGTVLLQLENTMQMSLKDLLRNTGRGGEEKKKEKEKEEQEERETKTPECPSHTQPLGVFLFPPKPKDTLMISRTPEVTCVVVDVSQEDPEVQFNWYVDGVEVHNAKTKPREEQFNSTYRVVSVLTVLHQDWLNGKEYKCKVSNKGLPSSIEKTISKAKGQPREPQVYTLPPSQEEMTKNQVSLTCLVKGFYPSDIAVEWESNGQPENNYKTTPPVLDSDGSFFLYSRLTVDKSRWQEGNVFSCSVMHEALHNHYTQKSLSLSLGK

SEQ ID NO: 50 - protein, 679 aa, synthetic construct
MQLRNPELHLGCALALRFLALVSWDIPGARALDNGLARTPTMGWLHWERFMCNLDCQEEPDSCISEKLFMEMAELMVSEGWKDAGYEYLCIDDCWMAPQRDSEGRLQADPQRFPHGIRQLANYVHSKGLKLGIYADVGNKTCAGFPGSFGYYDIDAQTFADWGVDLLKFDGCYCDSLENLADGYKHMSLALNRTGRSIVYSCEWPLYMWPFQKPNYTEIRQYCNHWRNFADIDDSWKSIKSILDWTSFNQERIVDVAGPGGWNDPDMLVIGNFGLSWNQQVTQMALWAIMAAPLFMSNDLRHISPQAKALLQDKDVIAINQDPLGKQGYQLRQGDNFEVWERPLSGLAWAVAMINRQEIGGPRSYTIAVASLGKGVACNPACFITQLLPVKRKLGFYEWTSRLRSHINPTGTVLLQLENTMQMSLKDLLGGGGSRNTGRGGEEKKKEKEKEEQEERETKTPECPSHTQPLGVFLFPPKPKDTLMISRTPEVTCVVVDVSQEDPEVQFNWYVDGVEVHNAKTKPREEQFNSTYRVVSVLTVLHQDWLNGKEYKCKVSNKGLPSSIEKTISKAKGQPREPQVYTLPPSQEEMTKNQVSLTCLVKGFYPSDIAVEWESNGQPENNYKTTPPVLDSDGSFFLYSRLTVDKSRWQEGNVFSCSVMHEALHNHYTQKSLSLSLGK

SEQ ID NO: 51 - protein, 684 aa, synthetic construct
MQLRNPELHLGCALALRFLALVSWDIPGARALDNGLARTPTMGWLHWERFMCNLDCQEEPDSCISEKLFMEMAELMVSEGWKDAGYEYLCIDDCWMAPQRDSEGRLQADPQRFPHGIRQLANYVHSKGLKLGIYADVGNKTCAGFPGSFGYYDIDAQTFADWGVDLLKFDGCYCDSLENLADGYKHMSLALNRTGRSIVYSCEWPLYMWPFQKPNYTEIRQYCNHWRNFADIDDSWKSIKSILDWTSFNQERIVDVAGPGGWNDPDMLVIGNFGLSWNQQVTQMALWAIMAAPLFMSNDLRHISPQAKALLQDKDVIAINQDPLGKQGYQLRQGDNFEVWERPLSGLAWAVAMINRQEIGGPRSYTIAVASLGKGVACNPACFITQLLPVKRKLGFYEWTSRLRSHINPTGTVLLQLENTMQMSLKDLLGGGGSGGGGSRNTGRGGEEKKKEKEKEEQEERETKTPECPSHTQPLGVFLFPPKPKDTLMISRTPEVTCVVVDVSQEDPEVQFNWYVDGVEVHNAKTKPREEQFNSTYRVVSVLTVLHQDWLNGKEYKCKVSNKGLPSSIEKTISKAKGQPREPQVYTLPPSQEEMTKNQVSLTCLVKGFYPSDIAVEWESNGQPENNYKTTPPVLDSDGSFFLYSRLTVDKSRWQEGNVFSCSVMHEALHNHYTQKSLSLSLGK

SEQ ID NO: 52 - protein, 689 aa, synthetic construct
MQLRNPELHLGCALALRFLALVSWDIPGARALDNGLARTPTMGWLHWERFMCNLDCQEEPDSCISEKLFMEMAELMVSEGWKDAGYEYLCIDDCWMAPQRDSEGRLQADPQRFPHGIRQLANYVHSKGLKLGIYADVGNKTCAGFPGSFGYYDIDAQTFADWGVDLLKFDGCYCDSLENLADGYKHMSLALNRTGRSIVYSCEWPLYMWPFQKPNYTEIRQYCNHWRNFADIDDSWKSIKSILDWTSFNQERIVDVAGPGGWNDPDMLVIGNFGLSWNQQVTQMALWAIMAAPLFMSNDLRHISPQAKALLQDKDVIAINQDPLGKQGYQLRQGDNFEVWERPLSGLAWAVAMINRQEIGGPRSYTIAVASLGKGVACNPACFITQLLPVKRKLGFYEWTSRLRSHINPTGTVLLQLENTMQMSLKDLLGGGGSGGGGSGGGGSRNTGRGGEEKKKEKEKEEQEERETKTPECPSHTQPLGVFLFPPKPKDTLMISRTPEVTCVVVDVSQEDPEVQFNWYVDGVEVHNAKTKPREEQFNSTYRVVSVLTVLHQDWLNGKEYKCKVSNKGLPSSIEKTISKAKGQPREPQVYTLPPSQEEMTKNQVSLTCLVKGFYPSDIAVEWESNGQPENNYKTTPPVLDSDGSFFLYSRLTVDKSRWQEGNVFSCSVMHEALHNHYTQKSLSLSLGK

SEQ ID NO: 53 - protein, 5 aa, synthetic construct
GGGGS

SEQ ID NO: 54 - protein, 10 aa, synthetic construct
GGGGSGGGGS

SEQ ID NO: 55 - protein, 15 aa, synthetic construct
GGGGSGGGGSGGGGS

SEQ ID NO: 56-62 - skipped (7 entries)

SEQ ID NO: 63 - protein, 121 aa, Homo sapiens
EVQLVQSGAEVSQPGESLKISCKGSGYSFTGYWISWVRQMPGKGLEWMGIIYPGDSDTKYTPSFQGQVTISTDKSINTAYLQWSSLKASDTAMYYCARRGDGLYYYGMDVWGQGTTVTVSS

SEQ ID NO: 64 - protein, 124 aa, Homo sapiens
EVQLVESGPGLVKPSETLSLTCTASGGSISTYYWSWIRQPPGKGLEWIGYIYYSGSTNYNPSLKSRVTISVDTSKNQFSLKLSSVTAADTAVYYCARDRIAPVGKFFGWYFDLWGRGTLVTVSS

SEQ ID NO: 65 - protein, 117 aa, Homo sapiens
EVQLVESGGGLVQPGGSLRLSCAASGFTFSTYAMHWVRQAPGKGLEYVSGISSNGGSTYYANSVKGRFTISRDNSKNTLYIQMGSLRAEDMAVYYCARSSSRGFDYWGQGTLVTVSS

SEQ ID NO: 66 - protein, 124 aa, Homo sapiens
EVQLVESGPGLVKPSETLSLTCAVSGDSTSSSSSYWDWIRQPPGKGLEWIGNIYYTGTTYYNPSLKSRVTISVDTSKDQFSLKLSSVTAADTAVYYCARELFTAVAGKGGIDYWGQGTLVTVSS

SEQ ID NO: 67 - protein, 129 aa, Homo sapiens
QVQLVQSGGGVVQPGRSLRLSCAAPGFTFSSYGMHWVRQAPGKGLEWVAVISYDGSNKYYADSVKGRFTISRDNSKNTLYLQMNSLRAEDTAVYYCAKDFKGGSSSWYTPEIEYGMDVWGQGTTVTVSS

SEQ ID NO: 68 - protein, 135 aa, Homo sapiens
QVQLVQSGSELKKPGASVKVSCKASGYTFTSYAMNWVRQAPGQGLEWMGWINTNTGNPTYAQGFTGRFVFSLDTSVSTAYLQISSLKAEDTAVYYCARLIRHEAHTYCSGGSCYSPDYYYGMDVWGQGTMVTVSS

SEQ ID NO: 69 - protein, 120 aa, Homo sapiens
EVQLLQSGGGLVQPGGSLRLSCVASGFTFSSYEMNWVRQAPGKGLEWVSYISTSGSTINYADSVKGRFSISRDNAKKSLYLQMNSLRAEDTAVYYCASNPPLGEPYFDIWGQGTMVTVSS

SEQ ID NO: 70 - protein, 119 aa, Homo sapiens
EVQLLESGGGVVQPGRSLRLSCAASGFTFSNYAMHWVRQAPGKGLEWVAVISYDGSNKYYADSVKGRFTISRDNSKNTLYLQMNSLRAEDTAVYYCARWGGGMQYLDVWGQGTTVTVSS

SEQ ID NO: 71 - protein, 126 aa, Homo sapiens
EVQLVQSGSELKKPGASVKVSCKASGYTFTSYAMNWVRQAPGQGLEWMGWINTNTGNPTYAQGFTGRFVFSLDTSVSTAYLQISSLKAEDTAVYYCARAGPNYDFWSGYYQTFDYWGQGTMVTVSS

SEQ ID NO: 72 - protein, 124 aa, Homo sapiens
EVQLVQSGAEVKKPGASVKVSCKVSGYTLTELSMHWVRQAPGKGLEWMGGFDPEDGETIYAQKFQGRVTMTEDTSTDTAYMELSSLRSEDTAVYYCATATAMDGYYYYYGMDVWGQGTTVTVSS

SEQ ID NO: 73 - protein, 121 aa, Homo sapiens
EVQLVESGAEVKKPGESLKISCKGSGYSFTSYWIGWVRQMPGEGLEWMGIIYPGDSDTRYSPSFQGQVTISADKSISTAYLQWSSLKASDTAMYYCASAGSSWYGDAFDIWGQGTMVTVSS

SEQ ID NO: 74 - protein, 122 aa, Homo sapiens
QVQLVQSGAEVKKPGASVKVSCKVSGCTLTELSMHWVRQAPGKGLEWMGGFDPEDGETIYAQKFQGRVTMTEDTSTDTAYMELSSLRSEDTAVYYCATATIFGVANNWFDPWGQGTTVTVSS

SEQ ID NO: 75 - protein, 132 aa, Homo sapiens
QVQLVQSGGGVVQPGRSLRLSCAASGFTFSSYGMHWVRQAPGKGLEWVAVISYDGSNKYYADSVKGRFTISRDNSKNTLYLQMNSLRAEDTAVYYCAKDLGYYDILTGQLGGYYYYYGMDVWGQGTTVTVSS

SEQ ID NO: 76 - protein, 126 aa, Homo sapiens
QVQLVQSGGGLVQPGGSLRLSCAASGFTFSSYWMSWVRQAPGKGLEWVANINQDGSEKYYVDSVKGRFTISRDNAKNSLYLQMNSLRAEDTAVYYCARDWDYDILTGSWFGAFDIWGQGTMVTVSS

SEQ ID NO: 77 - protein, 121 aa, Mus musculus
QVQLKESGPGLVAPSQSLSITCTVSGFSLTSYAISWVRQPPGKGLEWLGVIWTGGGTNYNSALKSRLSISKDNSKSQVFLKMNSLQTDDTARYYCARKDYYYGSSYAMDYWGQGTSVTVSS

SEQ ID NO: 78 - protein, 121 aa, Mus musculus
EVQLQQSGAELVRPGASVKLSCKASGYTFSDYYINWVKQRPGQGLEWIARIYPGSGNTYYNEKFTGKATLTAEKSSSTAYMQLSSLTSEDSAVYFCARDYGSSYVDYFDYWGQGTTLTVSS

SEQ ID NO: 79 - protein, 121 aa, Mus musculus
EVQLQQSGAELVRPGASVKLSCTASGFNIKDDYMHWVKQRPEQGLEWIGWINPENGDTEYASKFQGKAAITADTSSNTACLQLSSLTSEDTAVYYCSTGGYGNYVDAMDYWGQGTSVTVSS

SEQ ID NO: 80 - protein, 121 aa, Mus musculus
QVQLKESGPGLVAPSQSLSITCTVSGFSLTSYAISWVRQPPGKGLEWLGVIWTGGGTNYNSALKSRLSISKDNSKSQVFLKMNSLQTDDTARYYCARKDYYGSSSNVMDYWGQGTSVTVSS

SEQ ID NO: 81 - protein, 120 aa, Mus musculus
QVQLKESGPGLVAPSQSLSITCTVSGFSLTNYAINWVRQPPGKGLEWLGVIWTGGGTNYNSALRSRLSISKDNSKSQVFLKMNSLHTDDTARYYCARKDYYGSSLAMDYWGQGTSVTVSS

SEQ ID NO: 82 - protein, 121 aa, Mus musculus
EVQLQQSGPELVKPGASVKISCKASGYSFTDYYMNWVKQSPEKSLEWIGEINPSTGGPTYNQKFKAKATVTVDKSSSTAYMQLKSLTSEDSAVYYCARRNYDLYYYAMDYWGQGTSVTVSS

SEQ ID NO: 83 - protein, 124 aa, Mus musculus
EVQLQQSGAELAKPGASVKLSCKASGYTFTNYWMHWVKQRPGQGLEWIGYINPSSGYTKFNQKFNDKATLTADKSSTTAYMQLSSPTYEDSAVYYCARSDYYGSSYVGYAMDYWGQGTSVTVSS

SEQ ID NO: 84 - protein, 121 aa, Mus musculus
EVQLQQPGPELVKPGASVKISCKASGYSFTDYYMNWVKQSPEKSLEWIGEINPSTGGTSYNQKFKGKATLTVDKSSSTAYMQLKSLTSEDSAVYYCARRNYDLYYYAMDYWGQGTSVTVSS

SEQ ID NO: 85 - protein, 121 aa, Mus musculus; identical to SEQ ID NO: 79

SEQ ID NO: 86 - protein, 121 aa, Mus musculus; identical to SEQ ID NO: 80

SEQ ID NO: 87 - protein, 121 aa, Mus musculus
EVQLQQPGPELVKPGASVKISCKASGYSFTDYYMNWVKQSPEKSLEWIGEINPSTGGTSYNQKFKGKATLTVDKSSSTAYMQLKSLTSEDSAVYYCSRRNYDLYYYAMDYWGQGTSVTVSS

SEQ ID NO: 88 - protein, 114 aa, Mus musculus
EVQLQQSGPELVKPGASVKISCKASGYSFTGYSMNWVKKSPEKSLEWIGEINPSTGGTTYNQKFKAKATLTVDKSSSTAYIQLKSLTSEDSAVYYCARGAGAYWGQGTLVTVSA

SEQ ID NO: 89 - protein, 118 aa, Mus musculus
EVQLQQSGPELVKPGASVKISCKASGYAFSSSWMNWVKQRPGKGLEWIGRIYPGDGDTNYNGKFKGKATLTADKSSSTAYMQLSSLTSEDSAVYFCARDHGPAWFAYRGQGTLVTVSA

SEQ ID NO: 90 - protein, 114 aa, Mus musculus; identical to SEQ ID NO: 88

SEQ ID NO: 91 - protein, 119 aa, Mus musculus
QVQLKESGPGLVAPSQSLSITCTVSGFSLTNYAISWVRQPPGKGLEWLGVIWTGGGTNYNSALKSRLSISKDNSKSQVFLKMNSLQTDDTARYYCARISYYDYEGVDYWGQGTTLTVSS

SEQ ID NO: 92 - protein, 127 aa, Mus musculus
QVQLVESGGGLVQPGGSLRLSCAASGFTFSSYAMHWVRQAPGKGLEYVSAISGNGGSTYYAKSVKGRFTISRDNSKNTLYLQMGSLRAEDMAVYYCARGAEYYDFWSGYYSAYFDYWGQGTLVTVSS

SEQ ID NO: 93 - protein, 120 aa, Mus musculus
QVQLKQSGPGLVAPSQSLSITCTVSGFSLINYAISWVRQPPGKGLEWLGVIWTGGGTNYNSALKSRLSISKDNSKSQVFLKMNSLQTDDTARYYCARKDYYGRYYGMDYWGQGTSVTVSS

SEQ ID NO: 94 - protein, 118 aa, Mus musculus
EVQLQQPGAELVKPGASVKVSCKASGYIFTNYWMHWVKQRPGQGLEWIGRIHPSDSDTKYNQKFKGKATLTVDKSSSTAYMQLSSLTSEDSAVYYCAILDSYWYFDVWGTGTTVTVSS

SEQ ID NO: 95 - protein, 119 aa, Mus musculus
EVQLQQSGPELVKPGASVKISCKASGYAFSSSWMNWVKQRPGKGLEWIGRIYPGDGDTNYNGKLKGKATLTADKSSSTAYMQLSSLTSEDSAVYFCARKSYGYWHFDVWGTGTTVTVSS

SEQ ID NO: 96 - protein, 114 aa, Mus musculus
EVQLQQPGPELVKPGTSVKISCKASGYTFTDYYMNWVKQSHGKSLEWIGDINPNNGGTNYNQKFKGKATLTVDKSSSTAYMELRSLTSEDSAVCYCAAGKGDYWGQGTTLTVSS

SEQ ID NO: 97 - protein, 118 aa, Mus musculus; identical to SEQ ID NO: 94

SEQ ID NO: 98 - protein, 114 aa, Mus musculus
EVQLQQSGPELVKPGTSVKISCKASGYTFTDYYMNWVKQSHGKSLEWIGDINPNNGGTNYNQKFKGKATLTVDKSSSTAYMELRSLTSEDSAVYYCAAGKGDYWGQGTTLTVSS

SEQ ID NO: 99 - protein, 120 aa, Mus musculus
EVQLQQSGPELVKPGASVKISCKASGYTFTDYYMNWVKQSHGKSLEWIGDINPNNGGTSYNQKFKGKATLTVDKSSSTAYMELRSLTSEDSAVYYCARKGDGYYGGFAYWGQGTLVTVSA

SEQ ID NO: 100 - protein, 122 aa, Mus musculus
EVQLQQSVADLVRPGASVKLSCTASGFNIKNTYMHWVKQRPEQGLEWIGRIDPTNGDTKYVSKFQGKATITADTSSNTAYLQLSSLTSEDTAIYYCATYGSYYLYYYAMNYWGQGTSVTVSS

SEQ ID NO: 101 - protein, 121 aa, Mus musculus
EVQLQQPGAELVRPGASVKLSCKASGYTFTDYYINWVKQRPGQGLEWIARIYPGTGTTYYNEKFKGKATLTAEKSSSTAYMQLSSLTSEDSAVYFCARYDGNLYYYAMDYWGQGTSVTVSS

SEQ ID NO: 102 - protein, 120 aa, Mus musculus
EVQLQQPGAELVKPGASVKMSCKASGYTFTSYWITWVKQRPGQGLEWIGDIYPGSGSTKYNEKFRSEATLTVDTSSTTAYMQLSSLTSEDSAVYYCARWDFYGSRTFDYWGQGTTLTVSS

SEQ ID NO: 103 - protein, 120 aa, Mus musculus
EVQLQQSGAELVKPGASVKMSCKASGYTFTSYWITWVKQRPGQGLEWIGDIYPGSGSTKYNEKFRSEATLTVDTSSTTAYMQLSSLTSEDSAVYYCARWDFYGSRTFDYWGQGTTLTVSS

SEQ ID NO: 104 - protein, 118 aa, Homo sapiens
EVQLVESGGGLVQPGGSLRLSCAASGFTVSSNYMSWVRQAPGKGLEWVSVIYSGGSTYYADSVKGRFTISRDNSKNTLYLQMNSLRAEDTAVYYCARATWLRGVMDVWGQGTTVTVSS

SEQ ID NO: 105 - protein, 126 aa, Homo sapiens
EVQLVESGGGLVQPGRSLRLSCAASGFTFDDYVMHWVRQAPGKGLEWVSGINWNSGSIGYADSVKGRFTISRDNAKNSLYLQMNSLRAEDTALYYCAKDVRYCSSTSCYFSAFDIWGQGTMVTVSS

SEQ ID NO: 106 - protein, 120 aa, Homo sapiens
EVQLVESGGGVVQPGRSLRLSCAASGFTFSGYAMHWVRQAPGKGLEWVAVISYDGSNKYYADSVKGRFTISRDNSKNTLYLQMNSLRAEDTAVYYCARGGGSYYYWFDPWGQGTMVTVSS

SEQ ID NO: 107 - protein, 123 aa, Homo sapiens
EVQLVQWGAGLLKPSETLSLTCAVYGGSFSGYYWSWIRQPPGKGLEWIGEINHSGSTNYNPSLKSRVTISVDTSKNQFSLKLSSVTAADTAVYYCARAGYSSSWYGVRGVDPWGQGTMVTVSS

SEQ ID NO: 108 - protein, 124 aa, Homo sapiens
QVQLLQSGGGVVQPGRSLRLSCAASGFTFSTYGMHWVRQAPGKGLEWVAVISYDGSNKYYADSVKGRFTISRDNSKNTLYLQMNSLRAEDTAVYYCAKGSDIVVVPVGNWFDPWGQGTLVTVSS

SEQ ID NO: 109 - protein, 128 aa, Homo sapiens
QVQLQESGPGLVKPSETLSLACTVSGGSVSSDNSYWSWIRQPPGKGLEWIGYTFHSGSANYNPSLKSRVTISVDTSKNQFSLKLSSVTAADTAVYYCARVQRYYPDSSGFYGRRFDIWGQGTLVTVSS

SEQ ID NO: 110 - protein, 121 aa, Homo sapiens
EVQLVESGGGVVQPGRSLRLSCAASGFTFSTYSMHWVRQAPGKGLEWVAVISYDGSNKYYADSVKGRFTISRDNSKNTLYLQVNSLRAEDTAVYYCARSGGGSYRGPFDYWGQGTLVTVSS

SEQ ID NO: 111 - protein, 124 aa, Homo sapiens
EVQLVESGPGLVKPSETLSLTCTVSGGSISSSSYYWGWIRQPPGKGLEWIGSIYYSGSTYYNPSLKSRVTISVDTSKNQFSLKLSSVTAADTAVYYSARGDRIQLWLLDAFDIWGQGTMVTVSS

SEQ ID NO: 112 - protein, 124 aa, Homo sapiens
EVQLVESGGGLVQPGGSLRLSCAASGFTFSSYAMSWVRQAPGKGLEWVSAISGSGGSTYYADSVKGRFTISRDNSKNTLYLQMNSLRAEDTAVYYCAKIGLGLGGLLRRYFDYWGQGTLVTVSS

SEQ ID NO: 113 - protein, 122 aa, Homo sapiens
QVQLVESGGGLLKPGETLSLSCAASGFTFSDYYWSWIRQAPGKGLEWIAVINHSGSTIYYPYPVKGVFIFSRDTANNFSLKLMNMMTSDTAVYYCGTRIMITWYSRRGMDGWGKGVTVTVSS

SEQ ID NO: 114 - protein, 132 aa, Homo sapiens
EVQLVESGAEVKKPGASVKVSCKASGYTFTSYYIHWVRQAPGQGLEWMGVINPSGGSTTYAQKFQGRVTVTRDTSTSTVYMELSSLRSEDTAVYYCARERGDSSGYYEIITTANRRFGMDVWGQGTTVTVSS

SEQ ID NO: 115 - protein, 124 aa, Homo sapiens
EVQLVESGAEVKKPGSSVKVSCKASGGTFSSFAISWVRQAPGQGLEWMGGIIPIFDTTNYAQKFQGRVTITADESTRTAYMELSSLRSEDTAVYYCARIPGWDRGTDRNWNDDWGQGTTVTVSS

SEQ ID NO: 116 - protein, 122 aa, Homo sapiens
EVQLVESGAEVKKPGSSVKVSCKASGGTFSSYAISWVRQAPGQGLEWMGGIIPIFGTANYAQKFQGRVTVTADESTSTAYMELSSLRSEDTAVYYCARTYSFDSSGYYYDYWGQGTMVTVSS

SEQ ID NO: 117 - protein, 124 aa, Homo sapiens
QVQLVESGGGVVLPGRSLRLSCAASGFTFSTFAMHWVRQAPGKGLEWVAVISDEGSNKYYADSVKGRFTISRDNSRNTLYLQMNSLRAEDTAVYYCARAFYDSNWSVGSYFDSWGQGTPVTVSS

SEQ ID NO: 118 - protein, 125 aa, Homo sapiens
EVQLLQSGGDLIQPGRSLRLSCAASGFSFEDYAMHWVRQAPGQGLEWVSGISYNGGSIDYVDSVKGRFTISRDNAKNALYLEMNSLRPEDTAFYYCAKDSVRREYTHARVPFDNWGLGTLVTVSS

SEQ ID NO: 119 - protein, 124 aa, Homo sapiens
EVQLLESGGGVVQPGRSLRLSCVASGFNFNNYGMHWVRQAPGKGLEWLAALSYEGSKEHYADSLKGRFTVSRDYSRATLHLHMNSLEPEDTAVYFCAKSSKIFYLGESREVDYWGRGTLVTVSS

SEQ ID NO: 120 - protein, 128 aa, Homo sapiens
EVQLVESGAEVKKPGASVKVSCKVSGYTLTELSMHWVRQAPGKGLEWMGGFDPEDGETMYAQKFQGRVTMTEDTSTDTAYMELSSLRSEDTAVYYCATSTAVAGTPDLFDYYYGMDVWGQGTTVTVSS

SEQ ID NO: 121 - protein, 126 aa, Homo sapiens
EVQLVESGGGLVQPGGSLRLSCAASGFTFSSYWMSWVRQAPGKGLEWVANINQDGSEKYYVDSVKGRFTISRDNAKNSLYLQVNSLRAEDTAVYYCARDWDYDILTGSWFGAFDIWGQGTTVTVSS

SEQ ID NO: 122 - protein, 120 aa, Homo sapiens
EVQLLESGGGLVQPGGSLRLSCTASGFTFSSYWMSWVRQAPGKGLEWVANIQQDGSEKYYVDSVKGRFTISRDNAKNSLYLQMNSLRAEDTAVYYCARPTIGYSYGSDYWGQGTTVTVSS

SEQ ID NO: 123 - protein, 125 aa, Homo sapiens
EVQLLESGGGVVQPGRSLRLSCVVSGFTFNNYGMHWVRQAPGKGLEWVAVISYEGSVKYYGDHVDGRFTISRDPFKNTLYLHMNNLRPDDTAVYYCAKVSAIFWLGQGLSPIDVWGQGTTVTVSS

SEQ ID NO: 124 - protein, 115 aa, Homo sapiens
EVQLVESGGGLVQPGGSLRLSCAASGFIVSSNYMSWVRQAPGKGLEWVSVIYSGGSTYYADSVKGRFTISRHNSKNTLYLQMNSLRAEDTAVYYCAREAYGMDVWGQGTTVTVSS

SEQ ID NO: 125 - protein, 118 aa, Homo sapiens
EVQLVESGGGLIQPGGSLRLSCAASGITVSSNYMSWVRQAPGKGLEWVSVIYSGGSTDYADSVKGRFTISRDKSKNTLYLQMNSLRAEDTAVYYCARDLGEAGGMDVWGQGTTVTVSS

SEQ ID NO: 126 - protein, 117 aa, Homo sapiens
EVQLVESGGGLIQPGGSLRLSCAASGIIVSSNYMTWVRQAPGKGLEWVSVIYSGGSTFYADSVKGRFTISRDNSKNTLYLQMSSLRAEDTAVYYCARDLGPYGMDVWGQGTTVTVSS

SEQ ID NO: 127 - protein, 117 aa, Homo sapiens
EVQLVESGGGLIQPGGSLRLSCAASEFIVSRNYMSWVRQAPGKGLEWVSVIYSGGSTYYADSVKGRFTISRDNSKNTLNLQMNSLRAEDTAVYYCARDYGDYYFDYWGQGTLVTVSS

SEQ ID NO: 128 - protein, 126 aa, Homo sapiens
QVQLVQSGSELKKPGASVKVSCKASGYTFTSYAMNWVRQAPGQGLEWMGWINTNTGNPTYAQGFTGRFVFSLDTSVSTAYLQISSLKAEDTAVYYCARPQGGSSWYRDYYYGMDVWGQGTTVTVSS

SEQ ID NO: 129 - protein, 124 aa, Homo sapiens
EVQLVESGGGVVQPGRSLRLSCAASGFTFSIYGMHWVRQAPGKGLEWVAVISYDGSNKYYADSVKGRFTISRDNSKNTLYLQMNSLRAEDTAVYYCAKEGRPSDIVVVVAFDYWGQGTLVTVSS

SEQ ID NO: 130 - protein, 117 aa, Homo sapiens
EVQLVESGGGLIQPGGSLRLSCAASGFTVSSNYMSWVRQAPGKGLEWVSVIYSGGSTYYADSVKGRFTISRDNSKNTLYLQMNSLRAGDTAVYYCARDYGDFYFDYWGQGTLVTVSS

SEQ ID NO: 131 - protein, 128 aa, Homo sapiens
QVQLVQSGAEVKKPGASVKVSCKASGYTFTGYYMHWVRQAPGQGLEWMGWINPISGGTNYAQKFQGRVTMTRDTSISTAYMELSRLRSDDTAVYYCASPASRGYSGYDHGYYYYMDVWGKGTTVTVSS

SEQ ID NO: 132 - protein, 123 aa, Homo sapiens
QVQLVQSGPEVKKPGTSVKVSCKASGFTFTSSAVQWVRQARGQRLEWIGWIVVGSGNTNYAQKFQERVTITRDMSTSTAYMELSSLRSEDTAVYYCAAPHCSGGSCLDAFDIWGQGTMVTVSS

SEQ ID NO: 133 - protein, 125 aa, Homo sapiens
QVQLVESGGGLVKPGGSLRLSCAASGFIFSDYCMSWIRRAPGKGLEWLSYISNSGTTRYYADSVKGRFTISRDNGRNSLYLQMDSLSAEDTAVYYCARRGDGSSSIYYYNYMDVWGKGTTVTVSS

SEQ ID NO: 134 - protein, 120 aa, Homo sapiens
EVQLVESGGGVVQPGRSLRLSCAASGFTFSSYGMHWVRQAPGKGLEWVTVISYDGRNKYYADSVKGRFTISRDNSKNTLYLQMNSLRAEDTAVYYCAREFGDPEWYFDYWGQGTLVTVSS

SEQ ID NO: 135 - protein, 122 aa, Homo sapiens
QVQLVQSGAEVKKPGASVKVSCMASGYTFTGYYMHWVRQAPGQGLEWMGWINPNSGGTNYAQKFQGRVTMTRDTSISTAYMELSRLRSDDTAVYYCARDSPFSALGASNDYWGQGTLVTVSS

SEQ ID NO: 136 - protein, 123 aa, Homo sapiens
EVQLVESGGGVVQPGRSLRLSCAASGFTFSSYAMHWVRQAPAKGLEWVAVILYDGSGKYYADSVKGRFTISRDNSKNTLYLQMNSLRAEDTAVYYCARDGIVDTALVTWFDYWGQGTLVTVSS

SEQ ID NO: 137 - protein, 138 aa, Homo sapiens
QVQLVQSGAEVKKPGSSVKVSCKASGGTFSSYAISWVRQAPGQGLEWMGGIIPIFGTANYAQKFQGRVTITADESTSTAYMELSSLRSEDTAVYYCARGNRLLYCSSTSCYLDAVRQGYYYYYYMDVWGKGTTVTVSS

SEQ ID NO: 138 - protein, 127 aa, Homo sapiens
EVQLVESGGGVVQPGRSLRLSCAASGFTFSRYGMHWVRQAPGKGLEWVAVISYDGSNKYYADSVKGRFTISRDNSKNTLYLQMNSLRAEDTAVYYCAKVTAPYCSGGSCYGGNFDYWGQGTLVTVSS

SEQ ID NO: 139 - protein, 126 aa, Homo sapiens
EVQLVESGGGLVQPGRSLRLSCAASGFTFDDYAMHWVRQAPGKGLEWVSGISWNSGTIGYADSVKGRFTISRDNAKNSLYLQMNSLRAEDTAFYYCAKAGVRGIAAAGPDLNFDHWGQGTLVTVSS

SEQ ID NO: 140 - protein, 121 aa, Homo sapiens
EVQLVESGGGVVQPGRSLRLSCAASGFTFSNYAIHWVRQAPGKGLEWVAVISYDGSNKYYADSVKGRFTISRDNSKNTLYLQMNSLRAEDTAVYYCARDFDDSSFWAFDYWGQGTLVTVSS

SEQ ID NO: 141 - protein, 120 aa, Homo sapiens
QVQLVQSGAEVKKPGASVKVSCKASGYTFTSYYMHWVRQAPGQGLEWMGIINPSGGSTSYAQKFQGRVTMTRDTSTSTVYMELSSLRSEDTAVYYCARVPREGTPGFDPWGQGTLVTVSS

SEQ ID NO: 142 - protein, 123 aa, Homo sapiens
QVQLQESGPGLVKPSQTLSLTCTVSGGSISSGGYYWSWIRQHPGKGLEWIGYIYYSGSTYYNPSLKSRVTISVDTSKNQFSLKLSSVTAADTAVYYCARVWQYYDSSGSFDYWGQGTLVTVSS

SEQ ID NO: 143 - protein, 129 aa, Homo sapiens
QVQLQESGPGLVKPSETLSVTCTVSGGSISSSRYYWGWIRQPPGKGLEWIGSIYYSGSTYYNPSLKSRVTISVDTSKNQFSLKLSSVTAADTAVYYCARHAAAYYDRSGYYFIEYFQHWGQGTLVTVSS

SEQ ID NO: 144 - protein, 127 aa, Homo sapiens
EVQLVESGGGVVQPGRSLRLSCAASGFTFSSYGMHWVRQAPGKGLEWVAVISYDGSNKYYADSVKGRFTISRDNSKNTLYLQMNSLRAEDTAVYYCAKASGIYCSGGDCYSYYFDYWGQGTLVTVSS

SEQ ID NO: 145 - protein, 123 aa, Homo sapiens
QVQLQESGPGLVKPSQTLSLTCTVSGGSISSGGYYWSWIRQHPGKGLEWIGYIYYSGSTYYNPSLKSRVTISVDTSKNQFSLKLSSVTAADTAVYYCARTMYYYDSSGSFDYWGQGTLVTVSS

SEQ ID NO: 146 - protein, 127 aa, Homo sapiens
EVQLVESGGGVVQPGRSLRLSCAASGFTFSSYGMHWVRQAPGKGLEWVAVISYDGSNKYYADSVKGRFTISRDNSKNTLYLQMNSLRAEDTAVYYCAKASGIYCSGGNCYSYYFDYWGQGTLVTVSS

SEQ ID NO: 147 - protein, 123 aa, Homo sapiens
EVQLVESGGGLVQPGGSLRLSCAASGFTFSSYDMHWVRQATGKGLEWVSAIGTAGDTYYPGSVKGRFTISRENAKNSLYLQMNSLRAGDTAVYYCARVGYDSSGYSGWYFDLWGRGTLVTVSS

SEQ ID NO: 148 - protein, 117 aa, Homo sapiens
QVQLVESGGGLIQPGGSLRLSCAASGFIVSSNYMSWVRQAPGKGLEWVSVIYSGGSTFYTDSVKGRFTISRDNSKNTLYLQMNSLRAEDTAVYYCVRDYGDFYFDYWGQGTLVTVSS

SEQ ID NO: 149 - protein, 117 aa, Homo sapiens
QVQLVESGGGLIQPGGSLRLSCAASGFIVSSNYMSWVRQAPGKGLEWVSVIYSGGSTFYADSVKGRFTISRDNSKNTLYLQMNSLRAEDTAVYYCARDYGDYYFDYWGQGTLVTVSS

SEQ ID NO: 150 - protein, 123 aa, Homo sapiens
QVQLQQWGAGLLKPSETLSLTCAVSGGSLSGFYWTWIRQPPGKGLEWIGETNHFGSTGYKPSLKSRVTISVDMSRNQFSLKVTSVTAADTAVYYCARKPLLYSDFSPGAFDIWGQGTMVTVSS

SEQ ID NO: 151 - protein, 123 aa, Homo sapiens
QVQLQQWGAGLLKPSETLSLSCAVYGGSLSGYYWSWIRQPPGKGLEWIGEINHFGSTGYNPSLKSRVTISVDTSKSQFSVKLSSVTAADTAVYYCARKPLLYSNLSPGAFDIWGQGTMVTVSS

SEQ ID NO: 152 - protein, 118 aa, Homo sapiens
QVQLVESGGGLIQPGGSLRLSCAASGFTVSSNYMSWVRQAPGKGLEWVSVIYSGGSTYYADSVKGRFTISRDNSKNTLYLQMNSLRAEDTAVYYCARGEGWELPYDYWGQGTLVTVSS

SEQ ID NO: 153 - protein, 132 aa, Homo sapiens
QLQLQESGPGLVKPSETLSLTCTVSGASVSSGSYYWSWIRQPPGKGLEWIGYIYYSGSTNYNPSLKSRVTISVDTSKNQFSLKLSSVTAADTAVYYCARERPGGTYSNTWYTPTDTNWFDTWGQGTLVTVSS

SEQ ID NO: 154 - protein, 122 aa, Homo sapiens
QVQLVQSGAEVKKPGASVRVSCKASGYTFTSYGFSWVRQAPGQGLEWMGWISAYNGNTNFAQKLQGRVTMTTDTSTSTAYMELRSLRSDDTAVYYCARGEAVAGTTGFFDYWGQGTLVTVSS

SEQ ID NO: 155 - protein, 120 aa, Homo sapiens
QVQLQESGPGLVKPSGTLSLTCAVSGGSISSTNWWSWVRQPPGKGLEWIGEIYHTGSTNYNPSLKSRVTISVDKSKNQFSLKLSSVTAADTAVYYCVRDGGRPGDAFDIWGQGTMVTVSS

SEQ ID NO: 156 - protein, 119 aa, Homo sapiens
EVQLVESGGGLVQPGGSLRLSCAASGFTFSSYWMSWVRQAPGKGLEWVANIKQDGSEKYYVDSVKGRFTISGDNAKNSLYLHMNSLRAEDTAVYYCAIQLWLRGGYDYWGQGTLVTVSS

SEQ ID NO: 157 - protein, 128 aa, Homo sapiens
QVQLQQSGAEVKKPGESLKISCKGSGYSFTSYWIGWVRQMPGKGLEWMGIIYPGDSDTRYSPSFQGQVTISADKSISTAYMQWSSLKASDTAMYYCARSFRDDPRIAVAGPADAFDIWGQGTMVTVSS

SEQ ID NO: 158 - protein, 127 aa, Homo sapiens
QLQLQESGPGLVKPSETLSLTCTVSGGSISSYYWSWIRQPPGKGLEWIGYIYYSGSTNYNPSLKSRVTISVDTSKNQFSLKLSSVTAADTAVYYCARVEDWGYCSSTNCYSGAFDIWGQGTMVTVSS

SEQ ID NO: 159 - protein, 121 aa, Homo sapiens
QVQLVESGGGVVQPGRSLRLSCAASGFTFSSHAMHWVRQAPGKGLEWVAVISYDGSNKYYADSVKGRFTISRDNSKNTLYLQMNSLRAEDTAVYYCAREDYYDSSGSFDYWGQGTLVTVSS

SEQ ID NO: 160 - protein, 125 aa, Homo sapiens
QVQLVESGGGVVQPGRSLRLSCAASGFTFSNFGMHWVRQAPGKGLEWVAVIWYDGSNKYYADSVKGRFTISRDNSKNTLYLQMNSLRAEDTAVYYCARGVNPDDILTGVDAFDIWGQGTMVTVSS

SEQ ID NO: 161 - protein, 117 aa, Homo sapiens
QVQLVESGGGLIQPGGSLKLSCVVSGFTVSKNYISWVRQAPGKGLEWVSVIFAGGSTFYADSVKGRFAISRDNSNNTLFLQMNSLRVEDTAIYYCARGDGELFFDQWGQGTLVTVSS

SEQ ID NO: 162 - protein, 120 aa, Homo sapiens
QVQLVESGGGLIKPGRSLRLSCTASGFTFGDYAMTWFRQAPGKGLEWVGFIRSKAYGGTTGYAASVKYRFTISRDDSKSIAYLQMDSLKTEDTAVYYCTRWDGWSQHDYWGQGTLVTVSS

SEQ ID NO: 163 - protein, 118 aa, Homo sapiens
QVQLVESGGGVVQPGRSLRLSCAASGFTYSTYAMHWVRQAPGKGLEWVAFISYDGSNKYYADSVKGRFTISRDNSKNTLYLQMNSLRAEDTAVYYCARDFYHNWFDPWGQGTLVTVSS

SEQ ID NO: 164 - protein, 127 aa, Homo sapiens
QVQLVESGGGVVQPGRSLRLSCAASGFTFSTYAMHWVRQAPGEGLEWVAVISYDGSNTYYADSVKGRFTISRDNSKNTLYLQMNSLRAEDTAVYYCARDPIWFGELLSPPFVHFDYWGQGTLVTVSS

SEQ ID NO: 165 - protein, 127 aa, Homo sapiens
QVQLVESGGGVVQPGRSLRLSCAASGFTFSNYAMHWVRQAPGKGLEWVAVISYDGSNKYYADSVKGRFTISRDNSKNTLYLQMNSLRAEDTAIYYCASGYTGYDYFVRGDYYGLDVWGQGTTVTVSS

SEQ ID NO: 166 - protein, 127 aa, Homo sapiens
QVQLVQSGAEVKKPGASVKVSCKASGYTFTSYYMHWVRQAPGQGLEWMGIINPSGGSTSYAQKLQGRVTMTRDTSTSTVYMELSSLRSEDTAVYYCARANHETTMDTYYYYYYMDVWGKGTTVTVSS

SEQ ID NO: 167 - protein, 118 aa, Homo sapiens
EVQLVESGGGLIQPGGSLRLSCAASGFTVSSNYMTWVRQAPGKGLEWVSLIYPGGSTYYADSVKGRFTISRDNSKNTLYLQMNSLRAEDTAVYYCAREGMGMAAAGTWGQGTLVTVSS

SEQ ID NO: 168 - protein, 129 aa, Homo sapiens
QVQLVQSGAEVKKPGASVKVSCKASGYTFTGYYMHWVRQAPGQGLEWMGWISPVSGGTNYAQKFQGRVTMTRDTSISTAYMELSRLRSDDTAVYYCARAPLFPTGVLAGDYYYYGMDVWGQGTTVTVSS

SEQ ID NO: 169 - protein, 119 aa, Homo sapiens
EVQLVESGGGLIQPGGSLRLSCAASGLTVSSNYMSWVRQAPGKGLEWVSVLYSGGSSFYADSVKGRFTISRDNSKNTLYLQMNSLRAEDTAVYYCARESGDTTMAFDYWGQGTLVTVSS

SEQ ID NO: 170 - protein, 116 aa, Homo sapiens
EVQLVESGGGLIQPGGSLRLSCAASGVTVSRNYMSWVRQAPGKGLEWVSVIYSGGSTYYADSVKGRFTISRDNSKNTLYLQMNSLRAEDTAVYYCARDLSAAFDIWGQGTMVTVSS

SEQ ID NO: 171 - protein, 125 aa, Homo sapiens
EVQLVESGGGLVQPGGSLRLSCAASGFTFSGYSMNWVRQAPGKGPEWVSYISRSSSTIYYADSVKGRFTISRDNAKNSLYLQMNSLRDEDTAVYYCAREGARVGATYDTYYFDYWGQGTLVTVSS

SEQ ID NO: 172 - protein, 123 aa, Homo sapiens
QVQLVQSGPEVKKPGTSVKVSCKASGFTFTSSAVQWVRQARGQRLEWIGWIVVGSGNTNYAQKFQERVTITRDMSTSTAYMELSSLRSEDTAVYYCAAPYCSGGSCSDAFDIWGQGTMVTVSS

SEQ ID NO: 173 - protein, 118 aa, Homo sapiens
QVQLQESGPGLVKPSETLSLSCAVSGGSIGSYFWSWIRQPPGKGLEWIGYLHYSGSTNYNPSLKSRVTISVDTSKNQFSLKLSSVTAADTAVYYCARLQWLRGAFDIWGQGTMVTVSS

SEQ ID NO: 174 - protein, 125 aa, Homo sapiens
QVQLVQSGAEVKKPGASVKVSCKASGYTFTGYYMHWVRQAPGQGLEWMGWINPNSGGTNYAQKFQGRVTMTRDTSISTAYMELSRLRSDDTAVYYCATAHPRRIQGVFFLGPGVWGQGTTVTVSS

SEQ ID NO: 175 - protein, 125 aa, Homo sapiens
EVQLLESGGGLVQPGGSLRLSCAASGFTFSTYAMSWVRQAPGKGLEWVSTITGSGRDTYYADSVKGRFTISRDNSKNTLFLQLNSLRAEDAAVYSCANHPLASGDDYYHYYMDVWGKGTTVTVSS

SEQ ID NO: 176 - protein, 120 aa, Homo sapiens
QVQLVQSGAEVKKPGASVKVSCKASGYTFTNYYMHWVRQAPGQGLEWMGIINPSGGSTGYAQKFQGRVTMTRDTSTSTVYMELSSLRSEDTAVYYCARSRPTPDWYFDLWGRGTLVTVSS

SEQ ID NO: 177 - protein, 122 aa, Homo sapiens
QVQLVQSGSEVKKPGSSVKVSCKASGGTFSSYAFSWVRQAPGQGLEWMGRIIPILALANYAQKFQGRVTITADKSTSTAYMELSSLRSEDTAVYYCARVNQAVTTPFSMDVWGQGTTVTVSS

SEQ ID NO: 178 - protein, 122 aa, Homo sapiens
QVQLQESGPGLVKPSGTLSLTCAVSGGSISSNNWWSCVRQPPGKGLEWIGEIYHSGSTNYNPSLKSRVTISVDKSKNQFSLKLSSVTAADTAVYYCARGGDTAMGPEYFDYWGQGTLVTVSS

SEQ ID NO: 179 - protein, 123 aa, Homo sapiens
QVQLVESGGGVVQPGRSLRLSCAASGFTFSSYAMHWVRQAPGKGLEWVAVILYDGSNKYYADSVKGRFTISRDNSKNTLYLQMNSLRAEDTAVYYCARDSDVDTSMVTWFDYWGQGTLVTVSS

SEQ ID NO: 180 - protein, 123 aa, Homo sapiens
EVQLLESGGGLVQPGGSLRLSCAASGFTFSNYAMSWVRQAPGKGLEWVSAISGSDGSTYYAGSVKGRFTISRDNSKNTLYLQMNSLRAEDTAVYYCAKDPLITGPTYQYFHYWGQGTLVTVSS

SEQ ID NO: 181 - protein, 119 aa, Homo sapiens
QVQLVESGGGVVQPGRSLRLSCAASGFTFSSYAMHWVRQAPGKGLEWVAVIPFDGRNKYYADSVTGRFTISRDNSKNTLYLQMNSLRAEDTAVYYCASSSGYLFHSDYWGQGTLVTVSS

SEQ ID NO: 182 - protein, 119 aa, Homo sapiens
EVQLVESGGGLVQPGGSLRLSCAASGFTFSTYWMSWVRQPPGKGLEWVANIKQDGSEKYYVDSVKGRFTISRDNAKNSLYLQMNSLRADDTAVYYCAGGTWLRSSFDYWGQGTLVTVSS

SEQ ID NO: 183 - protein, 121 aa, Homo sapiens
EVQLVESGGGVVQPGRSLRLSCAASGFTFSSYAMHWVRQAPGKGLEWVAVISYDGSNKYSADSVKGRFTISRDNSKNTLYLQMNSLRAEDTAVYYCAKGGAYSYYYYMDVWGKGTTVTVSS

SEQ ID NO: 184 - protein, 117 aa, Homo sapiens
EVQLVESGGGLVQPGGSLRLSCAASGVTVSSNYMSWVRQAPGKGLEWVSLIYSGGSTFYADSVKGRFTISRDNSENTLYLQMNTLRAEDTAVYYCARDLYYYGMDVWGQGTTVTVSS

SEQ ID NO: 185 - protein, 124 aa, Homo sapiens
EVQLVESGGGVVQPGRSLRLSCAASGFTFSSYAMFWVRQAPGKGLEWVAVISYDGSNKYYADSVKGRFTISRDNSKNTLYLQMNSLRAEDTAVYYCARADLGYCTNGVCYVDYWGQGTLVTVSS

SEQ ID NO: 186 - protein, 129 aa, Homo sapiens [sequence omitted]

SEQ ID NO: 187 - protein, 131 aa, Homo sapiens
EVQLVESGGGLIQPGGSLRLSCAASGFTVSNNYMSWVRQAPGKGLEWVSVIYSGGSTYYADSVKGRFTISRDKSKNTLYLQMNRLRAEDTAVYYCAREGEVEGYNDFWSGYSRDRYYFDYWGQGTLVTVSS

SEQ ID NO: 188 - protein, 131 aa, Homo sapiens
EVQLVESGGGLIQPGGSLRLSCAASGFSVSSNYMSWVRQAPGKGLEWVSVIYSGGSTYYADSVKGRFTISRDNSKNTLYLQMNSLRAEDTAVYYCAREGEVEGYYDFWSGYSRDRYYFDYWGQGTLVTVSS

SEQ ID NO: 189 - protein, 120 aa, Homo sapiens
EVQLVESGGGLVKPGGSLRLSCAASGLTFTAYRMNWVRQAPGKGLEWLSSISNTNGDIYYADSVKGRFTISRDNAKNSLYLQMNSLRADDTAVYYCARDVASNYAYFDLWGQGTLVTVSS

SEQ ID NO: 190 - protein, 120 aa, Homo sapiens
EVQLVQSGAEVKKPGESLKISCKGSGYRFTNYWIGWVRQMPGKGLEWMGIIYPGDSDTRYSPSFQGQVTISADKSITTAYLQWSSLKASDTAMYYCARLSDRWYSPFDPWGQGTLVTVSS

SEQ ID NO: 191 - protein, 115 aa, Homo sapiens
EVQLVESGGGLVQPGGSQRLSCAASGFTVSSNYMSWIRQAPGKGLEWVSVIYSGGSAYYVDSVKGRFTISRDNSKNTLYLQMNSLRPEDTAVYYCARIANYMDVWGKGTTVTVSS

SEQ ID NO: 192 - protein, 127 aa, Homo sapiens
EVQLVESGGGLVQPGGSLRLSCVASGFTFSSYWMHWVRQVPGKGPVWVSHINSEGSSTNYADSVRGRFTISRDNAKDTLYLQMNNLRAEDTAVYYCARPTAVAAAGNYFYYYGMDVWGQGTTVTVSS

SEQ ID NO: 193 - protein, 122 aa, Homo sapiens
EVQLVESGGGLVKPGGSLRLSCAASGFTFSSYNMNWVRQAPGKGLEWVSCISSSSSYIYYADSVKGRFTISRDNAKNSLYLQMNSLRAEDTAVYYCARERGYDGGKTPPFLGGQGTLVTVSS

SEQ ID NO: 194 - protein, 122 aa, Homo sapiens
EVQLVESGGGLIQPGGSLRLSCAASGFTVSSNYMSWVRQAPGKGLEWVSVIYSGYSTYYVDSVKGRFTISRDNSKNTLYLQMNSLRAEDTAVYYCARVGGAHSGYDGSFDYWGQGTLVTVSS

SEQ ID NO: 195 - protein, 127 aa, Homo sapiens
QVQLVESGGGVVQPGRSLRLSCAASGFTFSRYGMHWVRQAPGKGLEWVAVMSYDGSSKYYADSVKGRFTISRDNSKNTLCLQMNSLRAEDTAVYYCAKQAGPYCSGGSCYSAPFDYWGQGTLVTVSS

SEQ ID NO: 196 - protein, 117 aa, Homo sapiens
EVQLVESGGGLIQPGGSLRLSCAASGFIVSSNYMSWVRQAPGKGLEWVSVIYSGGSTFYADSVKGRFTISRDNSKNTLYLQMNSLRAEDTAVYYCARDFGEFYFDYWGQGTLVTVSS

SEQ ID NO: 197 - protein, 124 aa, Homo sapiens
QVQLVESGGGVVQPGRSLRLSCAASGFTFSNYGMHWVRQAPGKGLEWVAVISYDGNNKYYADSVKGRFTISRDNSKNTLYLQMNSLRAEDTAVYYCAKDPFPLAVAGTGYFDYWGQGTLVTVSS

SEQ ID NO: 198 - protein, 129 aa, Homo sapiens [sequence omitted]

SEQ ID NO: 199 - protein, 122 aa, Homo sapiens
QVQLVQSGAEVKKPGSSVKVSCKASGGTFSSYAINWVRQAPGQGLEWMGRIIPIVGIANYAQKFQGRVTITADKSSSTAYMELSSLRSEDTAVYYCARDLLDPQLDDAFDIWGQGTMVTVSS

SEQ ID NO: 200 - protein, 121 aa, Homo sapiens
EVQLVESGGGLVQPGRSLRLSCAASGFTFDDYAMHWVRQAPGKGLEWVSGISWNSGSIGYADSVKGRFTISRDNAKNSLYLQMNSLRAEDTALYYCVKGVEYSSSSNFDYWGQGTLVTVSS

SEQ ID NO: 201 - protein, 117 aa, Homo sapiens
EVQLVESGGGLVQPGGSLRLSCAASGFTVSSNYMSWVRQAPGKGLEWVSLIYSGGSTYYADSVKGRFTISRDNSKNTLYLQMNSLRAEDTAVYYCARDTLGRGGDYWGQGTLVTVSS

SEQ ID NO: 202 - protein, 126 aa, Homo sapiens
EVQLLESGGGLEQPGGSLRLSCAASGFTFSTYAMSWVRQAPGKGLEWVSAISGSGAGTFYADSVKGRFTISRDNSKNTLYLQMNSLRAEDTAVYYCARESDCGSTSCYQVGWFDPWGQGTLVTVSS

SEQ ID NO: 203 - protein, 124 aa, Homo sapiens
QVQLVQSGAEVKKPGASVKVSCKASGHTFTSYYMHWVRQAPGQGLEWMGIINPSGGSTSYAQKFQGRVTMTRDTSTSTVYMELSSLRSEDTAVYYCARGPERGIVGATDYFDYWGQGTLVTVSS

SEQ ID NO: 204 - protein, 121 aa, Homo sapiens
EVQLLESGGGLVQPGGSLRLSCAASGFTFSSYAMSWVRQAPGKGLEWVSAISGSGGSTYYADSVKGRFTISRDNSKNTLYLQMNSLRAEDTAVYYCAKEPIGQPLLWWDYWGQGTLVTVSS

SEQ ID NO: 205 - protein, 119 aa, Homo sapiens
EVQLVQSGAEVKKPGESLKISCKGSGYSFTSYWIGWVRQMPGKGLEWMGIIYPGDSDTRYSPSFQGQVTISADKSISTAYLKWSSLKASDSAMYYCARGPNLQNWFDPWGQGTLVTVSS

SEQ ID NO: 206 - protein, 117 aa, Homo sapiens
EVQLVESGGGLIQPGGSLRLSCAASGFTVSSNYMSWVRQAPGKGLEWVSVIYSGGSTFYADSVKGRFTFSRDNSKNTLYLQMNSLRAEDTAVYYCARDLMAYGMDVWGQGTTVTVSS

SEQ ID NO: 207 - protein, 117 aa, Homo sapiens
EVQLVESGGGLVQPGGSLRLSCAASEFTVSSNYMSWVRQAPGKGLEWVSVIYSGGSTFYADSVKGRFTISRDNSKNTLYLQMNSLRPEDTAVYYCARDYGDFYFDFWGQGTLVTVSS

SEQ ID NO: 208 - protein, 120 aa, Homo sapiens
QVQLVQSGAEVKKPGASVKVSCKASGYTVTGYYIHWVRQAPGQGLEWMGWISPNSGGTNYAQKFQGWVTMTRDMSITTAYMELSRLRSDDTAVYYCARERYFDLGGMDVWGQGTTVTVSS

SEQ ID NO: 209 - protein, 120 aa, Homo sapiens
QVQLVESGGGVVQPGRSLRLSCAASGFTFSSYGMHWVRQAPGKGLEWVAAIWYDGSNKHYADSVKGRFTISRDNSKNTLYLQMNSLRAEDTAVYYCARDVGRVTTWFDPWGQGTLVTVSS

SEQ ID NO: 210 - protein, 122 aa, Homo sapiens
EVQLLESGGGLVQPGGSLRLSCAASGFTFSSYAMSWVRQAPGKGLEWVSAITDSGDGTFYADSVKGRFTISRDNSKNTLYLQMNSLRAEDTAVYYCASEEDYSNYVGWFDPWGQGTLVTVSS

SEQ ID NO: 211 - protein, 122 aa, Homo sapiens
EVQLVESGGGLVQPGGSLRLSCAASGFTFSSYDMHWVRQATGKGLEWVSAIGTAGDTYYPDSVKGRFTISRENAKNSLYLQMNSLRAGDTAVYYCARDRGSSGWYGWYFDLWGRGTLVTVSS

SEQ ID NO: 212 - protein, 130 aa, Homo sapiens
EVQLVQSGAEVKKPGASVKVSCKASGYTFTSYGISWVRQAPGQGLEWMGWISAYNGNTNYAQKLQGRVTMTTDTSTSTAYMELRSLRSDDTAVYYCAREGYCSGGSCYSGYYYYYGMDVWGQGTTVTVSS

SEQ ID NO: 213 - protein, 119 aa, Homo sapiens
EVQLVESGGGLVQPGGSLRLSCAASGFTVSSNYMSWVRQAPGKGLEWVSVIYSGGSTFYADSVKGRFTISRDNSMNTLFLQMNSLRAEDTAVYYCARVLPMYGDYLDYWGQGTLVTVSS

SEQ ID NO: 214 - protein, 117 aa, Homo sapiens
EVQLVESGGGLIQPGGSLRLSCAASGLTVSSNYMSWVRQAPGKGLEWVSVIYSGGSTFYADSVKGRFTISRDNSKNTLYLQMNSLRAEDTAVYYCARDLDVYGLDVWGQGTTVTVSS

SEQ ID NO: 215 - protein, 120 aa, Homo sapiens
QVQLVQSGAEVKKPGASVKVSCKASGYIYSGYFMHWVRQAPGQGLEWMGWISPDSGGANYAQTFQGRVTMTRDTSTTTAHMELSRLRSDDTAVYYCARGPRYSGTHFDYWGQGTLVTVSS

SEQ ID NO: 216 - protein, 120 aa, Homo sapiens
QVQLVQSGAEVKKPGASVKVSCKASGYIFSGYYTHWVRQAPGQGLEWMGWISPDSGGTNYAQKFQGRVTMTRDTSITTAYVELSGLRSDDTAVYYCARGPRYSGTYFDYWGQGTLVTVSS

SEQ ID NO: 217 - protein, 120 aa, Homo sapiens
QVQLVQSGAEVKKPGASVKVSCKASGYIYSGYYMHWVRQAPGQGLEWMGWISPDSGGTNYAQRFQGRVTMTRDTSTTTAYMELSRLRSDDTAVYYCARGPRYSGTYFDYWGQGTLVTVSS

SEQ ID NO: 218 - protein, 123 aa, Homo sapiens
EVQLVESGGGLIQPGGSLRLSCAASGFTVSSNYMSWVRQAPGKGLEWVSVIYSGGSTYYADSVKGRFTISRDNSKNTLYLQMNSLRAEDTAVYYCARDPYGYSSIWDGQGGHWGQGTLVTVSS

SEQ ID NO: 219 - protein, 133 aa, Homo sapiens
QVQLVESGGGLVKPGGSLRLSCAASGFTFNYYSMNWVRQAPGKGLEWISSISTSSSFVYYADSVKGRFTISRDNAKTSLYLQMNSLRAEDTAVYFCARGGYCSDGSCYVQDRLIYYYSGLDVWGQGTTVTVSS

SEQ ID NO: 220 - protein, 129 aa, Homo sapiens
EVQLVESGGGLVQPGGSLRLSCAASGFTFSTYEMNWVRQAPGKGLEWVSYISSSGSTIYYADSVKGRFTISRDNAKNSLYLQMSSLRAEDTAIYYCARDRRRRYCTNGVCYRPEEIDYWGQGTLVTVSS

SEQ ID NO: 221 - protein, 124 aa, Homo sapiens
QVQLVESGGGVVQPGRSLRLSCAASGFTFSSYGMHWVRQAPGKGLEWVALIWYDGSNKNYADSVKGRFTISRDNSKNTLDLQMNSLRAEDTAVYYCARDPFPGAVAGTGYLQYWGQGTLVTVSS

SEQ ID NO: 222 - protein, 123 aa, Homo sapiens
EVQLVESGGGVVQPGRSLRLSCAASGFTFRNYGMHWVRQAPGKGLEGVAVISYDGSNKYYADSVKGRFTISRDNSKNTLYLQMNSLRAEDTAVYYCAKSSGSYYYYYYGMDVWGQGTTVTVSS

SEQ ID NO: 223 - protein, 120 aa, Homo sapiens
EVQLVQSGAEVKKPGASVKVSCKASGYTFTSYYMHWVRQAPGQGLEWMGIINPSGGSTSYAQKFQGRVTMTRDTSTSTVYMELSSLRSEDTAVYYCARLHCGGDCYLDYWGQGTLVTVSS

SEQ ID NO: 224 - protein, 127 aa, Homo sapiens
EVQLLESGGGLVQPGGSLRLSCAASGFTFSSYAMSWVRQAPGKGLEWVSAISGSGGSTYYADSVKGRFTISRDNSKNTLYLQMNSLRAEDTAVYYCAKGSGSGSYPNYYYYYGMDVWGQGTTVTVSS

SEQ ID NO: 225 - protein, 117 aa, Homo sapiens
EVQLVESGGGLIQPGGSLRLSCAASGFTVSSNYMSWVRQAPGKGLEWVSVFYSGGSTYYADSVKGRFTISRDNSKNTLYLQMNSLRAEDTAVYYCARDYGDLYFDYWGQGTLVTVSS

SEQ ID NO: 226 - protein, 134 aa, Homo sapiens
QVQLVESGGGVVQPGRSLRLSCAASGFTFSSYGMHWVRQAPGKGLEWVAVISYDGSNKYYADSVKGRFTISRDNSKNTLYLQMSSLRGEDTAVYYCAKDQAYYDILTGYLNPPKNYYYYGMDVWGQGTTVTVSS

SEQ ID NO: 227 - protein, 120 aa, Homo sapiens
QVQLVQSGAEVKKPGASVKVSCKVSGYTLTELSMHWVRQAPGKGLEWMGGFDPEDGETIYAQKFQGRVTMTEDTSTDTAYMDLSSLRSEDTAVYYCATAFSIFGVVPPDYWGQGTLVTVS

SEQ ID NO: 228 - protein, 123 aa, Homo sapiens
QVQLQESGPGLVKPSETLSLTCTVSGGSISSSSYYWGWIRQPPGKGLEWIGSIYYSGSTYYNPSLKSRVTISVDTSKNQFSLKLSSVTAADTAVYYCARQGDCSTTSCAYDYWGQGTLVTVSS

SEQ ID NO: 229 - protein, 121 aa, Homo sapiens
EVQLVESGGGVVQPGRSLRLSCSASGFTFSIYGMHWVRQAPGKGLEWVAVISYDGSNKYYADSVKGRFTISRDNSKNTLYLQMNSLRAEDTAVYYCAKDRTGNYYYGMDVWGQGTTVTVSS

SEQ ID NO: 230 - protein, 125 aa, Homo sapiens
QVQLVESGGGLVQPGGSLRLSCAASGFTFSSYAMSWVRQAPGKGLEWVSAISGSGDSTYYADSVKGRFTISRDNSKNTLYLQMNSLRAEDTAVYYCAKDRYYEFWSGYSNWFDPWGQGTLVTISS

SEQ ID NO: 231 - protein, 124 aa, Homo sapiens
EVQLVQSGAEVKKPGESLKISCKGSGYSFTSYWIGWVRQMPGKGLEWMGIIYPGDSDTRYSPSFQGQVTVSADKSISTAYLQWSSLKASDTAMYYCARVNYYDSSGYPSFHFDYWGQGTLVTVS

SEQ ID NO: 232 - protein, 124 aa, Homo sapiens
QVQLVQSGAEVKKPGASVKVSCKASGYTFIGYYMHWVRQAPGQGLEWMGWINPNSGGTNYAQKFQGRVTMTRDTSISTVYMELSRLRSDDTAVYYCAREMPAAMGYYYYGMDVWGQGTTVTVSS

SEQ ID NO: 233 - protein, 120 aa, Homo sapiens
EVQLLESGGGLVQPGGSLRLSCAASGFTFSNYAMTWVRQAPGKGLEWVSAISSGSGSTYYADSVKGRFTISRDNSKNTVYLQMNSLRAEDTAIYYCAKANKYSSSEFDFWGQGTLVTISS

SEQ ID NO: 234 - protein, 117 aa, Homo sapiens
QVQLVESGGGLIQPGGSLRLSCAASGFTVSSNYMSWVRQAPGKGLEWVSVIYSGGSTFYADSVKGRFTISRDNSKSTLYLQMNSLRVEDTAVYYCARDFGDFYFDYWGQGTLVTVSS

SEQ ID NO: 235 - protein, 126 aa, Homo sapiens
QVQLVQSGAEVKKPGASVKVSCKASGYTFTGYYMHWVRQAPGQGLEWMGWISPNSGGTNYAQKFQGWVTMTRDTSVSTAYMELSRLRFDDTAVYYCATESWVYGSGSYSSGAFDIWGQGTMVTVSS

SEQ ID NO: 236 - protein, 120 aa, Homo sapiens
EVQLVQSGAEVKKPGASVKVSCKASGYIYSGYYMHWVRQAPGQGLEWMGWISPDSGGTNYAQRFQGRVTMTRDTSTTTAYMELSRLRSDDTAMYYCARGPRYSGTYFDYWGQGTLVTVSS

SEQ ID NO: 237 - protein, 120 aa, Homo sapiens
QVQLVQSGAEVKKPGASVKVSCKASGYIFSGYYMHWVRQAPGQGLEWMGWISPDSGGTNYAQKFQGRVTMTRDTSITTGYMELSGLRSDDTAVYYCARGPRYSGTYFDYWGQGTLVTVSS

SEQ ID NO: 238 - protein, 120 aa, Homo sapiens
EVQLVQSGAEVKKPGASVKVTCKTSGYIFSGYYMHWVRQVPGQGLEWMGWISPDSGATNYAQKFQGRVTMTRDTSITTSYVELTWLKSDDTAVYYCARGPRYSGTYFDFWGQGTLVTVSS

SEQ ID NO: 239 - protein, 120 aa, Homo sapiens; identical to SEQ ID NO: 216

SEQ ID NO: 240 - protein, 120 aa, Homo sapiens
EVQLVQSGAEVKKPGASVKVSCKASGYIFSGYYMHWVRQAPGQGLEWMGWISPDSGGTNYAQNFQGRVTMTRDTSISTGYMELSRLRSDDTAMYYCARGPRYSGTYFDYWGQGVLVTVSS

SEQ ID NO: 241 - protein, 122 aa, Homo sapiens
QVQLVQSGSELKKPGASVKVSCKASGYTFATYALNWVRQAPGQGLEWMGWVNTNTGSPTYAQGFTGRFVFSFDTSVSTAYLQIRTLKAEDTAVYYCAVYYYDSGSPGWFDPWGQGTLVTVSS

SEQ ID NO: 242 - protein, 125 aa, Homo sapiens
QVQLVQSGAEVKKPGSSVKVSCKASGGTFSIYAITWVRQAPGQGLEWMGGIIPIIGTANYAQKFQGRVTITADKSTSTAYMELSSLRSEDTAVYYCARDFRYCSSTRCYFWFDPWGQGTLVTVSS

SEQ ID NO: 243 - protein, 119 aa, Homo sapiens
EVQLVQSGAEVKKPGASVKVSCMASGYTFTSYYMHWVRQAPGQGLEWMGIISPSGGGTSYAQKFQGRVTLTRDTSTSTVYMELSSLRSEDTAVYYCARWYDSTGSIDYWGQGTLVTVSS

SEQ ID NO: 244 - protein, 121 aa, Homo sapiens
EVQLVESGGGLVQPGRSLRLSCAASGFTFDDYAMHWVRQAPGKGLEWVSGISWNSGSIAFAGSVKGRFTISRDNAKNSLYLQMNSLRAEDTALYYCAKDQGYSYGNYFDYWGQGTLVTVSS

SEQ ID NO: 245 - protein, 118 aa, Homo sapiens
QVQLVQSGAEVKKPGSSVKVSCKASGGTFSSSAISWVRQAPGQGLEWMGGIIPILDITNYAQKFQGRVTITADKSTSTAFMELSSLRSEDTAVYYCALRNQWDLLVYWGQGTLVTVSS

SEQ ID NO: 246 - protein, 121 aa, Mus musculus
QVQLQQPGAELVMPGASVKMSCKASGYTFTDYWMHWVKQRPGQGLEWIGAEDTSDSYTSYNQKFKGKATLTVDESSSTAYMQLSSLTSEDSAVYYCARRGYGSSYTWFAYWGQGTLVTVSA

SEQ ID NO: 247 - protein, 122 aa, Homo sapiens
QVQLVQSGAEVKKPGSSVKVSCKASGGTFSSYAISWVRQAPGQGLEWMGGIIPIFGTANYAQKFQGRVTITADKSTSTAYMELSSLRSEDTAVYYCARVSGYDSSGYWGDYWGQGTLVTVSS

SEQ ID NO: 248 - protein, 119 aa, Homo sapiens
QVQLVQSGAEVKKPGASVKVSCKASGYTFTSYGISWVRQAPGQGLEWMGWISAYNGNTNYAQKLQGRVTMTTDTSTSTAYMELRSLRSDDTAVYYCARDGELLGWFDPWGQGTLVTVSS

SEQ ID NO: 249 - protein, 126 aa, Homo sapiens
EVQLVESGGGLVQPGRSLRLSCTASGFTFGDYAMSWFRQAPGKGLEWVGFIRSKAYGGTTEYAASVKGRFTISRDDSKSIAYLQMNSLKTEDTAVYYCTRVRRLWFGSYYYGMDVWGQGTTVTVSS

SEQ ID NO: 250 - protein, 126 aa, Homo sapiens
EVQLVESGGGLVQPGRSLRLSCTASGFTFGDYAMSWFRQAPGKGLEWVGFIRSKAYGGTTEYAASVKGRFTISRDDSKSIVYLQMNSLKTEDTAVYYCTRVRRLWFGSYYYGMDVWGQGTTVTVSS

SEQ ID NO: 251 - protein, 120 aa, Homo sapiens
QVQLVQSGAEVKNPGASVKVSCKASGYIFTNYYIHWVRQAPGQGLEWVGWIHSLSGGTSYAQKFQGRVTLTRDASIRTAYMELSRLGSDDTALYYCARASVSTITDFDYWGQGTLVAVSS

SEQ ID NO: 252 - protein, 120 aa, Homo sapiens
QVQLVQSGAEVKKPGASVKVSCKASGYIFTNYYIHWVRQAPGQGLEWVGWIHSLSGGTSYAQKFQGRVTLTRDAPIRTAYMELSGLGSDDTAVYYCARASVATITDFDYWGQGTLVAVSS

SEQ ID NO: 253 - protein, 121 aa, Homo sapiens
QVQLVESGGGVVQPGRSLRLSCAASGFTFSYYAILWFRQAPGKGLEWVAIISYDGSNKYYADSVKGRFTISRDNSKNTLYLQMNSLRPEDTAVYYCARPQSGGYYAPLDYWGQGTLVTVSS

SEQ ID NO: 254 - protein, 123 aa, Homo sapiens
QVQLVESGGGVVQPGRSLRLSCAASGFTFSRYGMHWVRQAPGKGLEWVGIISYDASDKTYAESVKGRFTISRDNSKNTLYLQMNSLRAEDTAVYYCAKVSATYYYYYYGMDVWGQGTTVTVSS

SEQ ID NO: 255 - protein, 126 aa, Homo sapiens
QVQLVESGGGVVQPGRSLRLSCAASGFTFSTYAMHWVRQAPGKGLEWVAVISYDGSNKYYADSVKGRFTISRDNPKNTLYLQMNSLRAEDTAVYYCARDTATYVLLWSGDFNLDYWGQGTLVTVSS

SEQ ID NO: 256 - protein, 121 aa, Homo sapiens
QVQLVESGGGVVQPGRSLRLSCAASGFTFSTYAMHWVRQAPGKGLEWVTLISYDGGNKYYADSVKGRFTISRDNSKNTLYLQMNSLRAEDAAVYFCARGHTGNYYYGMDVWGQGTTVTVSS

SEQ ID NO: 257 - protein, 127 aa, Homo sapiens
QVHLVESGGGVVQPGRSLRLSCAASGFTFSNYGMHWVRQAPGKGLEWVAVISGDENNKFYANSVKGRFTISRDNSKNTLSLQMNSLRPEDTARYYCAKGGDSSGWAWDGDNPPTDYWGQGTLVIVSS

SEQ ID NO: 258 - protein, 122 aa, Homo sapiens
EVQLVESGGGLVQPGRSLRLSCAASGFTFDDYAMHWVRQAPGKGLEWVSGISWNSGSIGYADSVKGRFTISRDNAKNSLYLQMNSLRTEDTALYYCAMGPFGELLPYYFDYWGQGTLVTVSS

SEQ ID NO: 259 - protein, 121 aa, Homo sapiens
QVQLVQSGAEVKKPGASVKVSCKVSGYTLTELSIHWVRQAPGKGLEWMGGFDPEDAETIYAQNFQGRVTMTEDTSTDTAYMELSSLRSEDTALYYCAAAPAVMTAGWFDPWGQGTLVSVSS

SEQ ID NO: 260 - protein, 116 aa, Homo sapiens
QVQLEESGPGLVKPSETLSLTCTVSGGSISSHYWSWIRQPPGKGLEWIGYIQDSGSTNYNPSLKSRVTISVDTSKNQFSLRLSSVTTADTAVYYCVRGAMAWFDPWGQGTLVTVSS

SEQ ID NO: 261 - protein, 121 aa, Homo sapiens
QVQLVQSGAEVKKPGASVKVSCKVSGYTLIELSIHWVRQAPGKGLEWMGGFDPEDVETIYAQKFQGRVTMTEDTSTDTAYMELSSLTSEDRAVYYCATQPAAIGGTPPYYWGQGTLVTVSS

SEQ ID NO: 262 - protein, 128 aa, Homo sapiens
QVQLVQSGAEVKKPGASVKVSCKASGYTFTSYVISWVRQAPGQGLEWMGWISAYNGNTNYAQKLQGRVTMTTDTSTSTAYMELRSLRSDDTAVYYCARDQGPTYYYGSGSPHYGMDVWGQGTTVTVSS

SEQ ID NO: 263 - protein, 127 aa, Homo sapiens; identical to SEQ ID NO: 257

SEQ ID NO: 264 - protein, 128 aa, Homo sapiens
QVQLVQSGAEVKKPGASVKVSCKVSGYTLTELSIHWVRQAPGKGLEWMGGFDPEDGETVYAQKFQGRVTMTEDTSSDTAYMELSSLRSEDTAVYYCATSFPIRGDPSYYYYYYGMDVWGQGTTVTVSS

SEQ ID NO: 265 - protein, 119 aa, Homo sapiens
QVQLVESGGGVVQPGRSLRLSCAASGFIFSTYGMHWVRQAPGKGLEWVAVISYDGSNKYNADSVKGRFTISRDNSKNTLYLQMNSLRVEDTAVYYCAIYGYYYYGLDVWGQGTTVTVSS

SEQ ID NO: 266 - protein, 127 aa, Homo sapiens
QVHLVESGGGVVQPGRSLRLSCAASGFSFRNYGMHWVRQAPGKGLEWVAVISGDENNKFYANSVKGRFTISRDNSKNTLSLQMNSLRPEDTARYYCAKGGDSSGWAWDGDNPPTDYWGQGTLVIVSS

SEQ ID NO: 267 - protein, 119 aa, Homo sapiens
QVQLQESGPGLVKPSGTLSLTCVVSGGSISSSNWGWVRQPPGKGLEWIGEIYLSGTTNYNPSLTSRVTISVDKSKNQFSLKLNSVTAADTAIYYCARPTAGAGGAFDIWGQGTVVTVSS

SEQ ID NO: 268 - protein, 122 aa, Homo sapiens
QVTLKESGPVLVKPTETLTLTCTVSGFSLSNARMGVSWIRQPPGKALEWLAHIFWNDENSYSTSLKTRLTISKDTSKSQVVLNMTNMDPVDTATYYCARTEWLLSDNWFDSWGQGTLVTVSS

SEQ ID NO: 269 - protein, 122 aa, Homo sapiens
QVQLVQSGAEVKKPGASVKVSCKASGDTFSSYYLHWVRQAPGQGLQWMGISNPSGGSTTYAQKFQGRVTMTGDTSTSTVYMELSSLRSEDTAVYYCARGGLVPAARNAFDIWGQGTMVTVSS

SEQ ID NO: 270 - protein, 119 aa, Homo sapiens
QVQLQESGPGLVKPSGTLSLTCVVSGGSISSSNWGWVRQPPGKGLEWIGEIYHSGTTNYNPSLRSRVTISVDKSKNQLSLKLNSVTAADTAIYYCARPTAGAGGAFDTWGQGTMVTVSA

SEQ ID NO: 271 - protein, 127 aa, Homo sapiens
QVQLVQSGAEVKKPGASVKVSCKASGYTFTTYGISWVRQAPGQGLEWMGWISAYNGNSNYGKKFQGRVTMTADTSTSTAYMELRSLRSDDTAVYYCARDLPIKVVVPAADYNWFDPWGQGTLVTVSS

SEQ ID NO: 272 - protein, 122 aa, Homo sapiens
QITLKESGPTLVKPTQTLTLTCTFSGFSLNTNGVAVGWIRQPPGKALEWLALIYWDDDKRYSPSLKSRLTITKDTSKNQVVLTMTNMDPVDTATYYCAHRRGILTEDAFDIWGQGTMVTVSS

SEQ ID NO: 273 - protein, 117 aa, Homo sapiens
EVQLVESGGGLVQPGESLRLSCAASGITVSSNYMSWVRQAPGKGLEWVSVIYSGGSTFYADSVKGRFIISRHNSKNTLYLQMNSLRAEDTAVYYCARDLNEHGLDVWGQGTTVSVSS

SEQ ID NO: 274 - protein, 122 aa, Homo sapiens
QVQLVQSGAEVKKPGASVKVSCKASGYTFTSYYMHWVRQAPGQGLEWMGIINPSAGSTSYAQKFQGRVTMTRDTSTSTVYMELSSLRSEDTAVYYCARGTLIPAHRGAFDIWGQGTMVTVSS

SEQ ID NO: 275 - protein, 123 aa, Homo sapiens
QVQLQESGPGLVKPSQTLSLTCTVSGGSISSGTYYWSWIRQPAGKGLEWIGRFYTSGSTNYNPSLKSRVTISVDASKNQFSLKLSSVTAADTAVYYCARARPDYYYYYAMDVWGQGTTVTVSS

SEQ ID NO: 276 - protein, 123 aa, Homo sapiens
EVQLVESGGGLVQPGRSLRLSCAASGFTFDDYAMHWVRQAPGKGLEWVSGISWNSGSIAYTDSVKGRFTISRDNAKNSLYLQMNSLRAEDTALYYCAKAHSTGHQYYYGMDVWGQGTTVTVSS

SEQ ID NO: 277 - protein, 130 aa, Homo sapiens
QVQLVQSGAEVKKPGASVKVSCKASGYTFTDYYMHWVRQAPGQGLEWMGWINPNSRGTNYAQKFQGRVTMTRDTSISTVYMELSRLTSDDTAVYYCARVVVLGYGRPNNYYDGRNVWDYWGQGTLVTVSS

SEQ ID NO: 278 - protein, 117 aa, Homo sapiens
QVTLRESGPALVKPTQTLSLTCTFSGFSLGTSGMCVSWIRQPPGKALEWLARIDWDDDKYYSTSLKTRLTISKDTSKNQVVLTMTNMDPVDTATYYCARGVVTYDYWGQGTLVTVSS

SEQ ID NO: 279 - protein, 124 aa, Homo sapiens
QVQLVQSGAEVKKPGSSVKVSCKASGDTFSSYTINWVRQAPGQGLEWMGRIIPILGIPNYAQKFQGRVTITADKSTSTAFMELSSLRSEDTAVYYCARGRGYSNYGASYYMDVWGKGTTVTVSS

SEQ ID NO: 280 - protein, 121 aa, Homo sapiens
EVQLVESGGGLVQPGRSLRLSCAASGFTFDDYAMNWVRQPPGKGLEWVSGISWNSDSIGYADSVKGRFTISRDNAKNSLYLQMNSLRAEDTAMYYCAKGRGAGYTSYMDVWGKGTTVTVSS

SEQ ID NO: 281 - protein, 123 aa, Homo sapiens
QVQLAQSGAEVKKPGASVKVSCKAAGYTFTSYDINWVRQATGQGLEWMGWMNSNSGNAGYAQKFQGRVTMTRDTSTSTAYMELSSLTSDDTAVYYCARMRTGWPTHGRPDDFWGRGTLVTVSS

SEQ ID NO: 282 - protein, 122 aa, Homo sapiens
EVQLVESGGGLVQPGGSLRLSCAASGFTVSSNYMSWVRQAPGKGLEWVSVIYPGGSAFYADSVKGRFTISRHNSNNTLCLQMNSLRTEDTAVYYCARSYDILTGYRDAFDIWGQGTMVTVSS

SEQ ID NO: 283 - protein, 122 aa, Homo sapiens
QVQLQQWGAGLLKPSETLSLTCAVSGGSFSAYYWSWIRQPPGKGLEWIGEINHSGSTNYNPSLRSRVTISVDTSKNQFSLKLSSVTAADTAVYYCARVGYSQGYYYYYMDVWGKGTTVTVSS

SEQ ID NO: 284 - protein, 123 aa, Homo sapiens
QMQLVQSGPEVKKPGTSVKVSCKTSGFTFTSSAIQWVRQARGQRLEWIGWIVVGSGNTNYAQKFQERVTITRDMSTSTAYMELSSLRSEDTAVYYCAAPHCNRTSCYDAFDLWGQGTMVTVSS

SEQ ID NO: 285 - protein, 125 aa, Homo sapiens
QVQLVQSGAEVKKPGSSVKVSCKASGGTFSSYSITWVRQAPGQGLEWMGRIIPVLGIANYAQKFQDRVTITADKSTSTAYMELSSLRSEDTAVYYCARVGVSGFKSGSNWYFDLWGRGTLVTVSS

SEQ ID NO: 286 - protein, 117 aa, Homo sapiens
EVQLVESGGGLVQPGGSLRLSCAASGLTVRSNYMTWVRQTPGKGLEWVSVIYSGGSTFYADSVKGRFTISRDNSKNTVYLQMNSLRAEDTAVYYCARDLVTYGLDVWGQGTTVTVSS

SEQ ID NO: 287 - protein, 129 aa, Homo sapiens
EVQLVESGGGVVRPGGSLRLSCAASGFIFDDYDMTWVRQAPGKGLEWVSGISWNGGNTGYADSVKGRFTISRDNAKNSLYLQMNSLRAEDTALYHCAVIMSPIPRYSGYDWAGGAFDIWGQGTMVTVSS

SEQ ID NO: 288 - protein, 127 aa, Homo sapiens
QVQLVESGGGVVQPGRSLRLSCAASGFTFSNYGMHWVRQAPGKGLEWVAVMSYDGSNKYYADSVKGRFTISRDNSKNTLYLQMNSLRAEDTAVYYCAKNLGPYCSGGTCYSLVGDYWGQGTLVTVSS

SEQ ID NO: 289 - protein, 129 aa, Homo sapiens
EVQLVESGGGVVRPGGSLRLSCAASGFIFDDYDMTWVRQAPGKGLEWVSGINWNGGSTGYADSVKGRFTISRDNAKNSLYLQMNSLRAEDTALYHCAVIMSPIPRYSGYDWAGDAFDIWGQGTMVTVSS

SEQ ID NO: 290 - protein, 123 aa, Homo sapiens
QVQLVQSGAEVKKPGASVKVSCKASGYTFGSFDINWVRQATGQGLEWMGRMNSNSGNTAYAQKFQGRVTMTRDTSTNTAYMELSSLRSEDTAMYYCARMRSGWPTHGRPDDFWGRGTLVTVSS

SEQ ID NO: 291 - protein, 121 aa, Homo sapiens
EVQLVESGGGLVQPGRSLRLSCAASGFTFDDYAMHWVRQAPGKGLEWVSGISWNSGTIGYADSVKGRFIISRDNAKNSLYLQMNSLRPEDTALYYCAKDIIRQGEDGMDVWGQGTTVTVSS

SEQ ID NO: 292 - protein, 118 aa, Homo sapiens
EVQLLESGGGLIQPGGSLRLSCAASGFTFSNYAMSWVRQAPGKGLEWVSGIISTSGGATYNADSVRGRFTTSRDNSKNILYLQMNSLRGEDTAVYYCVKGLFDWFPLWGQGTMVTVSS

SEQ ID NO: 293 - protein, 119 aa, Homo sapiens
EVQLVESGGGLVQPGGSLRLSCAASGFTFSRHWMTWVRQAPGKGLEWVANIKQDGSEKYYVDSVKGRLTISRDNAKNSLYLQMNSLRAEDTAVYYCARLGFYYGGADYWGQGTLVTVSS

SEQ ID NO: 294 - protein, 122 aa, Homo sapiens
NVQLVESGGGLVQPGGSLRLSCAASGFTFHHYAMHWVRQAPGKGLEWVSGISGSSDYRAYADSLKGRFTISRDYAKNSLWLQMNSLTSEDTAFYYCAKGVDYGGKLAYFDSWGQGTLVTVSS

SEQ ID NO: 295 - protein, 124 aa, Homo sapiens
QVQLVESGGGVVQPGRSLRLSCAASGFSFSSYVMNWVRQAPGKGQLEWVAVISYDGSSKYYADSVKGRFTISRDNSKNTLYLQMNSLRAEDTAVYYCARDIDSGYDPTPVFDYWGQGTLVTVSS

SEQ ID NO: 296 - protein, 122 aa, Homo sapiens
EVQLVESGGGLVQPGGSLRLSCAASGFTFSSYDLHWVRQGTGKRLEWVSAIGTAGDTYYLGSVKGRFTISRENAKNSLYLQMNSLRAGDTAVYYCARVLYDSSGFYNWFDPWGQGTLVTVSS

SEQ ID NO: 297 - protein, 116 aa, Homo sapiens
EVQLVESGGGLIQPGGSLRLSCAASEVTVSSNYMSWVRQAPGKGLEWVSLIYSGGTTYYADSVKGRFTISRDNSKNTLYLQMNSLRAEDTAVYYCARDFLRWHDLWGQGTLVTVSS

SEQ ID NO: 298 - protein, 124 aa, Homo sapiens; identical to SEQ ID NO: 279

SEQ ID NO: 299 - protein, 122 aa, Homo sapiens
QLQLQESGPGLVKPSETLSLTCTVSGGSISSSSYYWGWIRQPPGNGLEWIGSIYYSGSTYYNPSLKGRVSISVDTSKNQFSLKLSSVTAADTAVYYCARILVIFTLNWFDPWGQGTLVTVSS

SEQ ID NO: 300 - protein, 131 aa, Homo sapiens
EVQLVESGGGLVKPGGSLRLSCAASGFTFRDVWMSWVRQAPGKGLEWVGRIKSKIDGGTTDYAAPVKGRFTISRDDSKNTLYLQMNSLKTEDTAVYYCTTAGSYYYDTVGPGLPEGKFDYWGQGTLVTVSS

SEQ ID NO: 301 - protein, 116 aa, Homo sapiens; identical to SEQ ID NO: 297

SEQ ID NO: 302 - protein, 122 aa, Homo sapiens
QVQLQESGPGLVKPSETLSLTCTVSGGSVSSGSYYWSWIRQPPGKGLECIGYIYYSGSSNYNPSLKSRVTISVDTSKNQFSLKMSSVTAADTAVYYCAGSPVPPTIVGASYWGQGTLVTVSS

SEQ ID NO: 303 - protein, 121 aa, Homo sapiens
EVQLVQSGAEVKKPGESLKISCKGSGYSFTSYWIDWVRQMPGKGLEWMGIIYPGDSDTRYSPSFQGQVTISADKSTSTAYLQWSSLKASDTAMYYCARRGEAAGIWYFDLWGRGTLVTVSS

SEQ ID NO: 304 - protein, 124 aa, Homo sapiens
EVQLVESGGGLVQPGGSLRLSCAASGFTVSSNYMSWVRQAPGKGLEWVSVIYSAGSTYYADSVKGRFSISRDKSKNTLYLQMNSLRAEDTAVYYCAKEGGSGSLRYYYYGMDVWGQGTTVTVSS

SEQ ID NO: 305 - protein, 124 aa, Homo sapiens
EVQLVESGGGLVQPGGSLRLSCEASGFTFSSSEINWVRQAPGKGLEWVSHISSSGSIIYYADSVKGRFTISRDNAKNSLYLQMNSLRAEDTAVYYCARRSYRSSWYYYYGMDVWGQGTTVTVSS

SEQ ID NO: 306 - protein, 121 aa, Homo sapiens
QVQLAESGGGVVQPGRSLRLSCAASGFTFSSYAMHWVRQAPGKGLEWVAVISYDGSNKYYADSVKGRFTISRDNSKNTLYLQMNSLRAEDTAVYYCARSTSGSYYYGMDVWGQGTTVTVSS

SEQ ID NO: 307 - protein, 124 aa, Homo sapiens
QVQLVESGGGVVQPGRSLRLSCAASGFTFSTYAMHWVRQAPGKGLEWVAVISYDGSNKYYADSVKGRFTISRDNSKNTLYLQMIGLRAEDTAVYYCARDWAPTYYDMPSAFDIWGQGTMVTVSS

SEQ ID NO: 308 - protein, 119 aa, Homo sapiens
QVQLVQSGAEVRKPGSSVKVSCKASGGTFSSYAISWVRQAPGQGLEWMGGIIPVFGTANYAQKFQGRVTITADKSTSTAFMELNSLRSEDTAVYYCARIGSYPEYFQHWGQGTLVTVSS

SEQ ID NO: 309 - protein, 121 aa, Homo sapiens
QVQLQESGPGLVKPSQTLSLTCTVSGGSISSGGYFWSWIRQHPGKGLEWIGSIYYSGSTYYNPSLRSRITISVDTSKNQFSLKLSSVTAADTAVYYCARGGSGSYSLFDYWGQGTLVTVSS

SEQ ID NO: 310 - protein, 121 aa, Homo sapiens; identical to SEQ ID NO: 306

SEQ ID NO: 311 - protein, 121 aa, Homo sapiens; identical to SEQ ID NO: 306

SEQ ID NO: 312 - protein, 117 aa, Homo sapiens; identical to SEQ ID NO: 286

SEQ ID NO: 313 - protein, 122 aa, Homo sapiens
QVQLVQSGAEVKKPGSSVKVSCKASGGTFSSYAIIWVRQAPGQGLEWMGGIIPIFGTTNYAQKFQGRVTITADESTSTAYVELSSLRSEDTAVYYCARIGHFDSSGYYLDYWGQGTLVTVSS

SEQ ID NO: 314 - protein, 119 aa, Homo sapiens
EVQLVESGGGLVQPGGSLRLSCVASGFTFSFYWMSWVRQAPGKGLEWVANIKQDGGEKYYVDSVKGRFTISRDNAKNSLYLQMNSLRAEDTAVYYCARLSGSSWDFDYWGQGTLVTVSS

SEQ ID NO: 315 - protein, 129 aa, Homo sapiens
EVQLVESGGGVVRPGGSLRLSCAASGFTFDDYGMSWVRQAPGKGLEWVSAINWNGGSTGYADSVKGRFTISRDNAKNSLYLQMNSLRAEDTALYHCARRRSSSRYSSGWYMYYYYMDVWGKGTTVTVSS

SEQ ID NO: 316 - protein, 119 aa, Homo sapiens; identical to SEQ ID NO: 314

SEQ ID NO: 317 - protein, 120 aa, Homo sapiens
QITFKESGPTLVKPTETLTLTCTFSGFSVSTSGEGVGWIRQPPGKALEWLAVIYWDDDKRYSPSLKSRLTITRDTSKNQVVLTMTNMDPVDTATYYCAHRLWFRDAFDIWGQGTTVTVSS

SEQ ID NO: 318 - protein, 119 aa, Homo sapiens
EVQLVESGGGLVQPGGSLRLSCAASGFTFSTYWMTWVRQAPGKGLEWVANIKQDGSEKYYVDSVKYRFTISRDNAKNSLYLQMNSLRAEDTAVYYCARVGSSSWYFDYWGQGTLVTVSS

SEQ ID NO: 319 - protein, 121 aa, Homo sapiens
QVQLVESGGGVVQPGRSLRLSCAASGFTFSSYAMHWVRQAPGKGLEWVAGISYDGSNKYYADSVKGRFTISRDNSKNTLYLQMNSLRAEDTAVYYCARADTMVRGTYFEYWGQGTLVTVSS

SEQ ID NO: 320 - protein, 119 aa, Homo sapiens
QVQLVESGGGVVQPGRSLRLSCAASGFTFSYYPMHWLWVRQAPGKGLEWVAVTSYDGTNKYYADSVKGRFTISRDNSKNTLYLQMNSLRAEDTAVYYCARGGATNFDYWGQGTLVTVSS

SEQ ID NO: 321 - protein, 126 aa, Homo sapiens
EAQLVESGGGLVQPGRSLRLSCAASGFTFDDSAMHWVRQAPGKGLEWVSGISWNSGNVGYADSVKGRFTISRDNAKNSLYLQMNSLRAEDTALYYCTKASRYCSSTICYWNWFDPWGQGTLVTVSS

SEQ ID NO: 322 - protein, 126 aa, Homo sapiens
EVQLVESGGGLVQPGGSLRLSCAASGFTFSSYEMNWVRQAPGKGLEWVSYISSSGSAIYYADSVKGRFTISRDNAKNSLYLQMNSLRVEDTAVYYCAREARSRYFDWLPSYYFDYWGQGTLVTVSS

SEQ ID NO: 323 - protein, 129 aa, Homo sapiens; identical to SEQ ID NO: 315

SEQ ID NO: 324 - protein, 127 aa, Homo sapiens
QVHLVESGGGVVQPGRSLRLSCAASGFTFSNYGMHWVRQAPGKGLEWVAVISNDEFNKFYANSVKGRFTISRDNSKNTVYLQLNSLRTEDTARYYCAKGGDGSGWAWDGDNPPTDYWGQGTLVIVSS

SEQ ID NO: 325 - protein, 123 aa, Homo sapiens
QMQLVQSGPEVKKPGTSVKVSCKASGFTFMSSAVQWVRQARGQRLEWIGWIVIGSGNTNYAQKFQERVTITRDMSTSTAYMELSSLRSEDTAVYYCAAPYCSSISCNDGFDIWGQGTMVTVSS

SEQ ID NO: 326 - protein, 124 aa, Homo sapiens
EVQLVQSGAEVKKPGESLKISCKGSGYSFTSYWIGWVRQMPGKGLEWMGIIYPGDSDTRYSPSFQGQVTISADKSISTAYLQWSSLKASDTAMYYCARPDYSSGWFSYWYFDLWGRGTLVTVSS

SEQ ID NO: 327 - protein, 121 aa, Homo sapiens
QVQLVQSGAEVKKPGASVKVSCKVSGYTLTELSIHWVRQAPGKGLEWMGGFDPEDAETIYAQQFQGRVTMTEDTSTDTAYMELSSLKSEDTALYYCATGFAVFGRAAVPYWGQGTLVTVSS

SEQ ID NO: 328 - protein, 121 aa, Homo sapiens
QVQLVESGGGVVQPGRSLRLSCAASGFTFSTYAMHWVRQAPGKGLAWVALISYDGYNKYYADSVRGRFTISRINSKNTLSLQMNSLRAEDTAVYYCARGSAGNYYYGMDVWGQGTTVTVSS

SEQ ID NO: 329 - protein, 121 aa, Homo sapiens
EVQLVQSGAEVKKPGESLKISCKGSGYSFTSHWIGWVRQMPGKGLEWMGIIYPGDSDTRYSPSFQGQVTISADKSISTAYLQWSSLKASDTAMYYCASALRERGVQLWSVWGQGTLVTVSS

SEQ ID NO: 330 - protein, 122 aa, Homo sapiens
QVQLVESGGGVVQPGRSLRLSCAASGFTFSSYAMHWVRQAPGKGLEWVAVISYDGSNKYYADSVKGRFTISRDNSKNTLYLQMNSLRVEDTAVYYCARDQEWFRELFLFDYWGQGTLVTVSS

SEQ ID NO: 331 - protein, 128 aa, Homo sapiens
EVQLVESGGGLVKPGGSLRLSCAASGFTFSSYSMNWVRQAPGKGLEWVSSISNSNSFIYYADSMKGRFTISRDNAKNSLYLQMNSLRAEDTAVYYCARVNGNSNWNFGSYYYYYMDVWGKGTTVTVSS

SEQ ID NO: 332 - protein, 122 aa, Homo sapiens; identical to SEQ ID NO: 313

SEQ ID NO: 333 - protein, 124 aa, Homo sapiens
EVQLVESGGGLVKPGGSLRLSCAASGFTFSGYSMNWVRQAPGKGLEWVSSISSSSSYIYYADSVKGRFTISRDNAKNSLYLQMNSLRAEDTAVYYCARWLQLRSDYYYFGMDVWGQGTTVTVSS

SEQ ID NO: 334 - protein, 122 aa, Homo sapiens
QVQLVQSGAEVKKPGSSVKVSCKASGGTFSSYAISWVRQAPGQGLEWMGGIIPIFGAANYAQNFQGRVTITADESTSTGYMQLSSLRFEDTAVYYCARTSHYDSSGSYFEYWGQGTLVTVSS

SEQ ID NO: 335 - protein, 121 aa, Homo sapiens
QVQLVESGGGVVQPGRSLRLSCAASGFTFSSYALFWVRQAPGKGLEWVAVISYDGNNKYYADSVRGRFTISRDNSKNTLYLQMNSLRPEDTAVYYCARPYTGSYKSYMDVWGKGTTVTVSS

SEQ ID NO: 336 - protein, 123 aa, Homo sapiens
QVQLQESGPGLVKPSETLSLTCTVSGGSISSYYWSWIRQPPGKGLEWIGYIYYSGSTNYNPSLKSRVTISVDMSKNQFSLKLRSVTAADTAVYYCARAPRERLQWGEYYFDYWGQGTLVTVSS

SEQ ID NO: 337 - protein, 118 aa, Homo sapiens
QVQLVESGGGVVQPGRSLRLSCAASGFTFSTYGMHWVRQAPGKGLEWVAVISYDGSNKYYADSVKGRFTISRDNSKNTLYLQMNSLRAEDTAMYYCAKDGSIAAADYWGQGTLVTVSS

SEQ ID NO: 338 - protein, 121 aa, Homo sapiens
EVQLVQSGAEVKKPGESLKISCKGSGYSFTNSWIGWVRQMPGKGLEWMGIIYPGDSDTRYSPSFQGQVTISADKSISTAYLQWSSLKASDTAIYYCATHRCSGGFCYLAYWGQGTLVTVSS

SEQ ID NO: 339 - protein, 128 aa, Homo sapiens
QVQLVESGGGVVQPGRSLRLSCAASGFTFSSYGMHWVRQAPGKGLEWVAVIWYDGSKKDYADSVKGRFTISRDNSKNTLYLQMNSLRAEDTAVYYCARDQSQGAYILTGYRGYGMDVWGQGTTVTVSS

SEQ ID NO: 340 - protein, 123 aa, Homo sapiens
QVQLQQWGAGLLKPSETLSLTCAVYGGSFSGHYWSWIRQPPGKGLEWIGEINHSGSTNYNPSLKSRVTISVDTSKNQFSLKLSSVTAADTAVYYCARPPQAARIHYYYYMDVWGKGTTVTVSS

SEQ ID NO: 341 - protein, 121 aa, Homo sapiens; identical to SEQ ID NO: 280

SEQ ID NO: 342 - protein, 112 aa, Homo sapiens
EVQLVESGGGLIQPGGSLRLSCAASGFIVSSNYMSWVRQAPGKGLEWVSVIYSGGSTYYADSVKGRFTISRDNSKNTLYLQMNSLRAEDTAVYYCARESTQWGQGTLVTVSS

SEQ ID NO: 343 - protein, 119 aa, Homo sapiens
QITLKESGPPLVEPKQTLTLTCTFSGFSLTTSGEAVGWIRQPPGKALEWLALIYWDDDKHYSPSLRNRLTITRDTSKNQVVLTLTNVDPADTGTYYCAHRAVILNFDHWGQGFLVTVSS

SEQ ID NO: 344 - protein, 121 aa, Homo sapiens
QVQLVESGGGVVQPGRSLRLSCAASGFTFSSYAMHWVRQAPGKGLEWVAVISYDGINKYYADAVKGRFTISRDNSKNTLYLQMNSLRAEDTAVYYCARPRSGSYYAYFDYWGQGTLVTVSS

SEQ ID NO: 345 - protein, 125 aa, Homo sapiens
EVQLVESGGGLVQPGRSLRLSCAASGFTFDDYAMHWVRQAPGKGLEWVSGISWNSGSIGYADSVKGRFTISRDNAKNSLYLQMNSLRAEDTALYYCAKVGYTISRQWLVGEFDYWGQGTLVTVSS

SEQ ID NO: 346 - protein, 121 aa, Homo sapiens; identical to SEQ ID NO: 303

SEQ ID NO: 347 - protein, 123 aa, Homo sapiens
QLQLQESGPGLVKPSETLPLTCTVSGGSISSSSYYWGWIRQPPGKGLQWIGNIYYSGSTYYNSSLKSRVTISVDTSKNQFSLKLSSVTAADTAVYYCARQSRGYSYAWSFDYWGQGTLVTVSS

SEQ ID NO: 348 - protein, 124 aa, Homo sapiens
QVQLVESGGGVVQPGRSLRLSCAASGFTFSNYGIHWVRQAPGQGLEWVAGIWYDGSNKYYVDSVKGRFTISRDNSKNTLYLQMNSLRAEDTAVYYCAGSSGEGGLYYYYGMDVWGQGTTVTVSS

SEQ ID NO: 349 - protein, 122 aa, Homo sapiens
QVQLVESGGGVVQPGRSLRLSCAASGFTFDSYGVHWVRQAPGKGLEWVAVISYDGSNKHYADSVKGRFTISRDNSKNTLYVQMNSLRTEDTAVYYCARDSGGNYGDSYFDYWGQGTLVTVSS

SEQ ID NO: 350 - protein, 121 aa, Homo sapiens; identical to SEQ ID NO: 328

SEQ ID NO: 351 - protein, 126 aa, Homo sapiens
QVTLKESGPVLVKPTETLTLTCAVSGFSLSNAKMGVSWIRQPPGKALEWLAHIFSNDEKAYSTSLKTRLTISKDTSKSQVVLTVTNMDPVDTATYYCARIVLGASGTYPSPGFDPWGQGTLVTVSS

SEQ ID NO: 352 - protein, 119 aa, Homo sapiens
EVQLVESGGGLVQPGGSLRLSCAASGFTFSSYWMHWVRQVPGKGLVWVSRINSDGSSTSYADSVKGRFTISRDNAKNTLYLEMNSLRAQDTAVYYCAGSPWLRGDIDYWGQGTLVTVSS

SEQ ID NO: 353 - protein, 127 aa, Homo sapiens
QVQLVQSGSELTKPGASVKVSCKASGYTFTSYAMNWVRQAPGQGLEWMGWINTDTGNPTYAQGFTGRFVFSLDTSVSTAYLQISSLKAEDTAVYYCARDPSYCSSTRCYTVGWFDPWGQGTLVTVSS

SEQ ID NO: 354 - protein, 121 aa, Homo sapiens
QVQLQESGPGLVKPSQTLSLTCTVSGDSINSGNYYWSWIRQPAGKGLEWIGRMFTSGSTNYNPSLTSRVTMSIDTSKNQFSLNLNSVTAADTAMYYCARGHVAAWESCYYWGQGILVTVSS

SEQ ID NO: 355 - protein, 130 aa, Homo sapiens
EVQLVESGGGVVRPGGSLRLSCAASGFTLDDYGLSWVRHAPGKGLEWVSGINWNGGRTAYADSVKGRFTISRDNAKNSLYLQMNSLRAEDTALYHCARARGPSEQYYDLLTGYYDAFDIWGQGTMVTVSS

SEQ ID NO: 356 - protein, 122 aa, Homo sapiens
EVQLLESGGGLVHPGGSLRLSCAASGFTFSSYALSWVRQAPGKGLEWVSAISGSGGSTYYADSVKGRFTISRDNSKNTLYLQMNRLRAEDTAVYYCAQMGPLGSTSSAADYWGQGTLVTVSS

SEQ ID NO: 357 - protein, 130 aa, Homo sapiens
QVQLVQSGAEVKKPGASVKVSCKASGYTFTSYDINWVRQATGQGLEWMGWMNPNSGNTGYAQKFQGRVTMTRNTSISTAYMELSSLRSEDTALYYCAREARYFDWIFEGSDYYYYGMDVWGQGTTVTVSS

SEQ ID NO: 358 - protein, 124 aa, Homo sapiens; identical to SEQ ID NO: 305

SEQ ID NO: 359 - protein, 129 aa, Homo sapiens
EVQLVESGGGLVQPGRSLRLSCTASGFIFGDYAMGWVRQAPGKGLEWVGFIRGKAYDGTTEYAASVKGRFTISRDDSKYIAHLQMNSLKTEDTAVYYCIRDYDFWGGYYYHPLRAFDIWGRGTMVTVSS

SEQ ID NO: 360 - protein, 119 aa, Homo sapiens
QITLKESGPTLVKPTQTLTLTCTFSGFSLSTSGVGVGWIRQPPGKALEWLALIYWDDDKRYSPSLKSRLSITKDTSKNQVVLTMTNMDPVDTGTYYCARHQIVVLFDMWGQGTRVTVSS

SEQ ID NO: 361 - protein, 122 aa, Homo sapiens
QVQLVQSGAEVKKPGSSVKVSCKASGGTFSSYAISWVRQAPGQGLEWMGGIIPIFGTANYAQKFQGRVTITADESTSTAYMELSSLRSEDTAVYYCAITYYYDSSGYWWDDWGQGTLVTVSS

SEQ ID NO: 362 - protein, 126 aa, Homo sapiens
QLQLQESGPGLVKPSETLSLTCTVSGGSISSSSYYWGWIRQPPGKGLEWIGTIYYSGSTYYNPSLKSRVTISVDTSKKQFSLKLSSVTAADTAVYYCAGEEVRGVKLYYYYAMDVWGQGTTVTVSS

SEQ ID NO: 363 - protein, 119 aa, Homo sapiens
EVQLVESGGRLVLPGGSLRLSCAASGFTFSVYEMNWVRQAPGKGLEWLSYIGTSGSPIYYADSVKGRFTVSRDNAKNSLYLQMNSLRVEDTALYYCARDRGWNYGLDYWGQGTLVTVSS

SEQ ID NO: 364 - protein, 123 aa, Homo sapiens
QVQLVESGGGVVQPGRSLRLSCAASGFTFSSYAMHWVRQAPGKGLEWVALISSDGGNKFYADSVKGRFTISRDNSKNTLYLQMNSLRAEDTAVYYCARDVPTTVTAFTVFTYWGQGTLVTVSS

SEQ ID NO: 365 - protein, 121 aa, Homo sapiens
QVQLVESGGGVVQPGRSLRLSCAASGFAFSNYAIHWVRQAPGKGLEWVAVISYDGNNKDYADSVKGRFTISRDNSKNTLYLQMNSLRAEDTAVYYCARVPVMVRGVYFDYWGQGTLVTVSS

SEQ ID NO: 366 - protein, 119 aa, Homo sapiens
QVQLVQSGAEVKKPGASVKVSCKVSGYTFTSYDINWVRQATGQGLEWMGWMNPNSGHTGYAQKFQGRVTMTRNTSISTAYMELSSLRYEDTAVYYCARGYGLTYYMDVWGKGTTVTVSS

SEQ ID NO: 367 - protein, 123 aa, Homo sapiens
QVQLAQSGAEVKKPGASVKVSCKAAGYTFTSYDINWVRQATGQGLEWMGWMNPNSGNAGYAQKFQGRVTMTRDTSISTAYMELSSLRSEDTAVYYCARMRSGWPTHGRPDDFWGRGTLVTVSS

SEQ ID NO: 368 - protein, 124 aa, Homo sapiens
EVQLLQSGGGLVQPGGSLRLSCAASGFTFRNYAMSWVRQAPGKGLEWVSAISGSGGTTYYADSVKGRFTISRDNSKNTLYLQMNSLRAEDTAVYYCAKNERITMLVVVTLFDYWGQGTLVTVSS

SEQ ID NO: 369 - protein, 124 aa, Homo sapiens
EVQLVESGGGLVQPGGSLRLSCAASGFTVSGNYMSWVRQAPGKGLEWVSVIYSGGSTYYADSVKGRFTISRDNSKNTLYLQMNSPRAEDTAVYYCARDPSAYYDILTGYSGDVWGKGTTVTVSS

SEQ ID NO: 370 - protein, 123 aa, Homo sapiens
QVQLVESGGGVVQPGRSLRLSCAASGFSFSSYVMNWVRQAPGKGLEWVAVISYDGSSKYYADSVKGRFTISRDNSKNTLYLQMNSLRAEDTAVYYCARDIDSGYDPTPVFDYWGQGTLVTVSS

SEQ ID NO: 371 - protein, 123 aa, Homo sapiens
QVQLQESGPGLVKPSGTLSLTCAVSGGSISSSNWWTWVRQPPGKGLEWIGEIYHSGSTNYNPSLKSRVTISVDKSKNQFSLKLSSVTAADTAVYYCASRWGDYFDSSGAYDSWGQGTLVTVSS

SEQ ID NO: 372 - protein, 127 aa, Homo sapiens
EVQLVESGGGLVKPGGSLRLSCAASGFTFSSYSMNWVRQAPGKGLEWVSCISSSSSFIYYADSVKGRFTISRDNAKNSLYLQMNSLRAEDTAVYYCARDPVWVDGELLSGGIPFDYWGQGTLVTVSS

SEQ ID NO: 373 - protein, 129 aa, Homo sapiens
QLQLQESGPGLVKPSETLSLTCTVSGGSIRSSSYYWGWIRQPPGKGLEWIASIYYSGSTYYNSSLKSRVTISVDTSKNQFSLKVNSMTAADTAVYYCAILWRGSSWADRHYYYYSMDVWGQGTTVTVSS

SEQ ID NO: 374 - protein, 117 aa, Homo sapiens
QVQLVESGGGVVQPGRSLRLSCTASGFTFSSYAMHWVRQAPGKGLEWVALISYDGNNKYYADSAKGRFTISRDNSKNTLYLQMNSLRSEDTAVYYCARDLGRGLDPWGQGTLVTVSS

SEQ ID NO: 375 - protein, 118 aa, Homo sapiens
EVQLLESGGGLIQPGGSLRLSCAASGFTFSNYAMSWVRQAPGKGLEWVSGIISSSGGATYNADSVRGRFTTSRDNSKNILYLQMNSLRGEDTAVYYCVKGLFDWFPLWGQGTMVTVSS

SEQ ID NO: 376 - protein, 122 aa, Homo sapiens
QVQLQESGPGLVKPSQTLSLTCAVSGASISSGSYYWSWIRQPAGKGLEWIGRIYTSGNTNYNPSLKSRVTISVDTSKNQFSLKLSSVTAADTAVYYCATGYIGTYYYYMDVWGKGTTVTVSS

SEQ ID NO: 377 - protein, 123 aa, Homo sapiens
EVQLVESGGGLVQPGRSLRLSCAASGFTFDDYAMHWVRQAPGKGLEWVSGISWNSGSIGYADSVKGRFTISRDNAKNSLYLQMNSLRAEDTALYYCAKVSSITSLLGYYFDSWGQGTLVTVSS

SEQ ID NO: 378 - protein, 117 aa, Homo sapiens; identical to SEQ ID NO: 278

SEQ ID NO: 379 - protein, 119 aa, Homo sapiens
QVQLVESGGGVVQPGRSLRLSCAASGFTFSNYAMHWVRQAPGKGLDWVAVISYDGSNRYYAASVKGRFTISRDNSKNTLYLQMNSLRTEDTAVYFCARGDGYRSQFDPWGQGTLVTVSS

SEQ ID NO: 380 - protein, 120 aa, Homo sapiens; identical to SEQ ID NO: 317

SEQ ID NO: 381 - protein, 128 aa, Homo sapiens
EVQLLESGGGLVQPGGSLRLSCAASGFTFNNYAMSWVRQAPGKGLEWVSAIGGSGGSTYYADSVKGRFTVSRDNSENTLYLQMSSLRAEDTAVYYCARVEGDWLLGGPYYHYYGMDVWGQGTTVTVSS

SEQ ID NO: 382 - protein, 122 aa, Homo sapiens; identical to SEQ ID NO: 299

SEQ ID NO: 383 - protein, 119 aa, Homo sapiens
EVQLVESGGGLVQPGGSLRLSCAASGFTFSIYWMSWVRQAPGKGLQWVANIKQDASEKYYVDSVKGRFTISRDNAKNSLYLQMNSLRAEDTAVYYCARLGGSSWHFDYWGQGTLVTVSS

SEQ ID NO: 384 - protein, 131 aa, Homo sapiens
QLQLQESGPGLVKPSETLSLTCTVSGGPISSSRYYWGWIRQPPGKGLEWIGSIYYSGSTYYNPSLKSRVTISVDTSKNQFSLKLNSVTAADTAVYYCARHDGSGEMDTITWGPIYYYMDVWGKGTTVTVSS

SEQ ID NO: 385 - protein, 120 aa, Homo sapiens; identical to SEQ ID NO: 317

SEQ ID NO: 386 - protein, 119 aa, Homo sapiens
QVQLVQSGAEVKKPGASVKVSCKASGYTFTSYGMHWVRQAPGQRLEWMGWINVGNGNTKYSQRFQGRVTITRDTSASTAYMELSSLRSEDTAVYYCAMGPSAFSWLDPWGQGTLVTVSS

SEQ ID NO: 387 - protein, 121 aa, Homo sapiens; identical to SEQ ID NO: 306

SEQ ID NO: 388 - protein, 123 aa, Homo sapiens
QITLKESGPTLVKPTQTLTLTCTFSGFSLNTSGVGVGWIRQPPGKALEWLALIYWDDDKRYNPSLKSRLTITKDTSKNQVVLTMTNMDPVDTATYYCAHRPPSYHGWCYFDYWGQGNLVTVSS

SEQ ID NO: 389 - protein, 117 aa, Homo sapiens
QVQVVQSGAEVKKPGASVKVSCKASGYTFKNYGISWVRQAPGQGLEWMGWISAYTGNTNYAQKFQGRMTMTTDTSTGTGYMELRSLRSDDTAVYYCARVQRRRLDYWGQGTLVIVSS

SEQ ID NO: 390 - protein, 123 aa, Homo sapiens; identical to SEQ ID NO: 340

SEQ ID NO: 391 - protein, 119 aa, Homo sapiens
EVQLVQSGAEVKKPGESLKISCKGSGYSFTSYWIGWVRQMPGKGLEWMGIIYPGDSDTTYNPSFQGQVTISADKSLTTAFLHWSSLKASDTAIYYCARRFYGPSSFDYWGQGTLVIVSS

SEQ ID NO: 392 - protein, 125 aa, Homo sapiens
QVQLVQSGAEVKRPGASMNISCKASGYNFNNNYIYWVRQAPGQGLEWMGVVNPTGGGTAYAQGFQDRVTITSDTPRNTVYLGVTGLHSEDTAVYFCARGGEWRIVPGGRDYFDYWGQGTLVTVSA

SEQ ID NO: 393 - protein, 131 aa, Homo sapiens
EVQLVQSGAEVKKPGESLKISCKGFGYNFTNYWIGWVRQMPGKGLEWMGIIYPGDSETRNSPSFQGQVTISADKSMSTAYLQWSSLKASDTAMYYCARLGVSKYCSGGRCLSGGSNWFDPWGQGTLVTVSS

SEQ ID NO: 394 - protein, 118 aa, Homo sapiens
EVHLVGSGGGLIQPGGSLRLSCAASGFTVSSNFMSWVRQAPGKGLEWVSIIHNGGDSYYTDSVKGRFTISRDNSKNTLYLQMNNLRAEDTAVYYCASSSWLRGAFDIWGQGTMVTVSS

SEQ ID NO: 395 - protein, 123 aa, Homo sapiens; identical to SEQ ID NO: 284

SEQ ID NO: 396 - protein, 128 aa, Homo sapiens
EVQLVESGGDLVKPGRSLRLSCSASGFTFGDYTMSWFRQAPGKGLEWVAFIRSKAYGGTTEYAASVIGRFTISRDDSKSIAYLQMNSLKSEDTAVYYCSRVRGSFYGSVGKNYGMDVWGQGTTVTVSS

SEQ ID NO: 397 - protein, 123 aa, Homo sapiens; identical to SEQ ID NO: 370

SEQ ID NO: 398 - protein, 122 aa, Homo sapiens; identical to SEQ ID NO: 334

SEQ ID NO: 399 - protein, 122 aa, Homo sapiens
EVQLVQSGAEVKKPGESLKISCKGSGYSFTTYWIGWVRQMPGKGLEWMGIIYPGDSDTRYSPSFQGQVTISADKSISTAYLQWSSLKASDTAMYYCARRRGGIGIEYGMDVWGQGTTVTVSS

SEQ ID NO: 400 - protein, 125 aa, Homo sapiens
QVQLVESGGGVVQPGRSLRLSCAASGFTFSSYAMHWVRQAPGKGLEWVADISYDGSEKYYADSVKGRFTIYRDNSKNTLYLQMNSLRAEDTAVYYCAKDFGGDNTAMVEYFFDFWGQGTLVTVSS

SEQ ID NO: 401 - protein, 122 aa, Homo sapiens
QVQLQESGPGLVKPSETLSLTCTVSGGSVSSGSYYWSWIRQPPGKGLECIGYIYYSGSSNYNPSLKSRVTISVDTSKNQFSLKMSSVTAADTAVYYCAGSPVPPTIVGASYWGQGTLVTDSS

SEQ ID NO: 402 - protein, 120 aa, Homo sapiens
QVQLVESGGGVVQPGRSLRLSCAASGFTFSNYGMHWVRQAPGKGLEWVAVISYDGTNKYYADSVKGRFTISRDNSKNTLYLQMNSLRADDTAVYYCAKGRGNYLTFFDSWGQGTLVTVSS

SEQ ID NO: 403 - protein, 127 aa, Homo sapiens
EVQLVESGGGLVQPGGSLRLSCAASGLTVSSNYMSWVRQAPGKGLEWVSVIYSGGSTYYADSVKGRFTISGDNSKNTLYLQMNSLRVDDTAVYYCARDPGSRYSGGWYDYYYAMDVWGQGTTVTVSS

SEQ ID NO: 404 - protein, 116 aa, Homo sapiens
EVQLVQSGAEVKKPGESLKISCKGSGYSFPTYWIGWVRQMPGKGLEWMGIIYPGDSDTRYGPSFQGQVTISADKSISTAYLQWSSLKASDTAMYYCARRDTDFDYWGQGTLVTVSS

SEQ ID NO: 405 - protein, 123 aa, Homo sapiens
QMQLVQSGPEVKKPGTSVKVSCKASGFTFTSSAVQWVRQARGQRLEWIGWIAVGSGNTNYAQKFQERVSITRDMSTSTAYMELSSLRSEDTAVYYCAAPYCSRTSCHDAFDIWGQGTKVTVSS

SEQ ID NO: 406 - protein, 125 aa, Homo sapiens
QVQLVESGGGVVQPGRSLRLSCVASGFTFSSYGMHWVRQAPGKGLEWVAVISFDGSNKYYADSVKGRFTISRDNSKNTLYLQMNSLRAEDTAVFYCAKDLPPYASGWYEGGFDYWGRGTQVTVSS

SEQ ID NO: 407 - protein, 120 aa, Homo sapiens
QVQLVESGGGVVQPGRSLRLSCAASGFTFSSYGMHWVRQAPGKGLEWVAVVSYDGSNKYYTDSVKGRFTISRDNSKNTLFLQMIGLREEDTAVYYCAQGRGGYYSPFDDWGQGTLVTVSS

SEQ ID NO: 408 - protein, 124 aa, Homo sapiens
QVTLKESGPVLVKPTETLTLTCTVSGFSLSNARMGVSWIRQPPGKALEWLAHIFSGDEKSYSTSLKSRLTISKDTSKSQVVLTMTNMDPLDTATYYCARTTWGTWIQAWYFDIWGRGTLVTVSS

SEQ ID NO: 409 - protein, 124 aa, Homo sapiens
QVQLVESGGGVVQPGRSLRLSCAASGFTFSSYGMHWVRQAPGKGLEWVAVIWFDGSNKHYADSVKGRFTISRDNSKNTLYLQMNSLRAEDTAVYYCAREGDFWSGYYTGWFDPWGQGTLVTVSS

SEQ ID NO: 410 - protein, 124 aa, Homo sapiens
QVQLVESGGGVVQPGRSLRLSCAASGFTFSSYGMHWVRQAPGKGLEWVAVISYDGSNKYYADSVKGRFTISRDNSKNTLYLQMNSLRAEDTAVYYCAKDLTIVVIPAAPNFDYWGQGTLVTVSS

SEQ ID NO: 411 - protein, 129 aa, Homo sapiens
EVQLLESGGGLVQPGGSLRLSCAASGFTFSSYAMSWVRQAPGKGLEWVSFISGTGDSTYYADSVKGRFTISRDNSKNTLYLQMNSLRAEDTAVYYCAKDQARVQDYIWGSYRSYGMDVWGLGTTVTVSS

SEQ ID NO: 412 - protein, 121 aa, Homo sapiens; identical to SEQ ID NO: 291

SEQ ID NO: 413 - protein, 123 aa, Homo sapiens; identical to SEQ ID NO: 290

SEQ ID NO: 414 - protein, 124 aa, Homo sapiens; identical to SEQ ID NO: 333

SEQ ID NO: 415 - protein, 119 aa, Homo sapiens; identical to SEQ ID NO: 314

SEQ ID NO: 416 - protein, 114 aa, Homo sapiens
EVQLVESGGGLVQPGGSLRLSCAASGFSVSTNYMSWVRQAPGKGLEWVSVIYSGGSTFYADSVKGRFTISRDNSKNTLYLQMNSLRAEDTAVYYCARDYRDWIWGQGTLVTVSS

SEQ ID NO: 417 - protein, 129 aa, Homo sapiens
QITLKESGPTLVKPTQTLTLTCTFSGFSLSTSGVGVGWIRQPPGKALEWLALIYWDDDKRYSPSLKSRLTITKDTSKNQVVLTMTNMDPVDTATYYCAHNRFQYCSSTTCYTLLPFDYWGQGTLVTVSS

SEQ ID NO: 418 - protein, 121 aa, Homo sapiens; identical to SEQ ID NO: 335

SEQ ID NO: 419 - protein, 126 aa, Homo sapiens
QVQLVESGGGVVQPGRSLRLSCAASGFTFSSYAMHWVRQAPGKGLEWVAVISYDGSNKYYADSVKGRFTISRDNSKNTLYLQMSSLRAEDTAVFYCARGDGDVYNFLLVRNWFDPWGQGTLVTVSS

SEQ ID NO: 420 - protein, 121 aa, Homo sapiens
QLQLQESGPGLVKPSETLSLTCTVSGGSISSSSYYWGWIRQPPGKGLEWIGSFYYSGSTYYNPSLKSRVTISVDTSKNQFSLNLSSVTAADTAVYSCASLWFGDLYSFDYWGQGTLVTVSS

SEQ ID NO: 421 - protein, 119 aa, Homo sapiens
EVQLVESGGGLVQPGGSLRLSCADSAFTFSSFWMSWVRQAPGKGLEWVANIKQDGSEKFYLDSVKGRFTISRDNAKNSLYLQMNSLRAEDTAVYYCARLGRSSWNFDYWGQGTLVTVSS

SEQ ID NO: 422 - protein, 125 aa, Homo sapiens
QVQLQESGPGLVKPSQTLSLTCTVSGDSISSGSYYWSWIRQPAGKGLEWIGRIYTSGSTTYNPSLKSRVTISVNTSKNQFSLNLSSVTAADTAVYYCARVGGISPYYYYYYMDVWGKGTTVTVSS

SEQ ID NO: 423 - protein, 123 aa, Homo sapiens
QVQLVQSGAEVKKPGASVKVSCKASGYTFTSYDINWVRQATGQGLEWMGWMNPNSGNAGYGQKFQGRVTMTRNTSISTAYMELSSLRSEDTAVYYCARMRSGWPTHGRPDDYWGRGTLVTVSS

SEQ ID NO: 424 - protein, 122 aa, Homo sapiens
QVQLQESGPGLVKPSQTLSLTCTVSGGSISSGGYYWSWIRQHPGKGLEWIGYIYYSGSTYYNPSLKSRVTISVDTSKNQFSLKLSSVTAADTAVYYCASAKLVATISYFDYWGQGTLVTVSS

SEQ ID NO: 425 - protein, 119 aa, Homo sapiens
QVQLQQWGAGLLKPSETLSLTCAVYGGSFSGYYWNWLRQPPGKGLEWIGEINHSGSTNYNPSLKSRVTISVDTSKNQFSLKLSSVTAADTAVYYCARVGGYYYYYMDVWGKGTTVTVSS

SEQ ID NO: 426 - protein, 115 aa, Homo sapiens
EVRLLESGGGLVQPGGSLRLSCAASGFTFSDYAMNWVRQAPGKGLEWVSAISATGGSTFYADSVKGRFSISRDNSKNSLVLQMNSLRAEDTAVYYCAKPYGMDVWGQGTTVTVSS

SEQ ID NO: 427 - protein, 131 aa, Homo sapiens
QGQLVQSGGDVVQPGKSLRLSCAASGFTFTNYAMHWVRQAPGKGLEWVAVISNDGSNEKYVDSVKGRFSLSRDNSKNTVYLDMHSLRPEDTAIYYCARDRSNLERLVMTFGGIIAGAFDIWGQGARVTVSS

SEQ ID NO: 428 - protein, 121 aa, Homo sapiens
QVQLVESGGGVVQPGRSLRLSCAASGFTFSSYAMYWVRQAPGKGLEWVAVISYDGINKYYADSVKGRFTISRDNSKNTLYLQMNSLRAEDTAVYYCARVNSGSYYSYFDYWGQGTLVTVSS

SEQ ID NO: 429 - protein, 123 aa, Homo sapiens
QVQLQESGPGLVKPSGTLSLTCAVSGGSISSSNWWSWVRQPPGKGLEWIGEIYHSGSTNYNPSLKSRVTISVDKSKNQFSLKLNSVTAADTAVYYCASRWGDYFDSSGAYDSWGQGTLLTVSS

SEQ ID NO: 430 - protein, 118 aa, Homo sapiens
QVQLVESGGGVVQPGKSLRLSCAASGFTFSSYGMHWVRQAPGKGLEWVAVIWYDGNNKFYVDSVKGRFTISRDNSKNTLYMEMNSLRAEDTAVYYCARKGPLWRFDYWGQGTLVTVSS

SEQ ID NO: 431 - protein, 112 aa, Homo sapiens; identical to SEQ ID NO: 342

SEQ ID NO: 432 - protein, 127 aa, Homo sapiens
QLQLQESGPGLVKPSETLSLTCTVSGGSISSSSYYWGWIRQPPGKGLEWIGSVYYIGSTYYNPSLKSRVTMSVDTSKNQFSLKLSSVTAADTAVYYCARAPFQLLDKYYFFYYMDVWGKGTTVTVSS

SEQ ID NO: 433 - protein, 116 aa, Homo sapiens
EVQLVESGGDLIQPGGSLRLSCAASGLTVSSNYMSWVRQAPGKGLEWVSIIYSGGSTYYADSVKGRFSISRDNSNNTLYLQMNSLRAEDTAVYFCARHIPAWGYKWGQGTLVTVSS

SEQ ID NO: 434 - protein, 124 aa, Homo sapiens
EVQLLESGGGLVQPGGSLRLSCAASGFTFTSYGMSWVRQAPGKGLEWVSAISISGGSTYYADSVKGRFTISRDNSKNTLYLQMNSLRAEDTAVYYCAKLLGSGITLDNDAFDIWGQGTMVTVSS

SEQ ID NO: 435 - protein, 122 aa, Homo sapiens; identical to SEQ ID NO: 313

SEQ ID NO: 436 - protein, 123 aa, Homo sapiens
EVQLLESGGGLVQPGGSLRLSCAASGFTFTSYAMNWVRQAPGKGLEWVSAISVSGGSTYYADSVKGRFTISRDNSKNTLYLQMNSLRAEDTAVYYCAKDFGSGIVGATGFDFWGQGTLVTVSS

SEQ ID NO: 437 - protein, 129 aa, Homo sapiens; identical to SEQ ID NO: 315

SEQ ID NO: 438 - protein, 121 aa, Homo sapiens; identical to SEQ ID NO: 338

SEQ ID NO: 439 - protein, 124 aa, Homo sapiens
QVQLVESGGGVVQPGRSLRLSCATSGFTFSSFALHWVRQAPGKGLEWVTVISDDGNNKYYVDSVKGRFTISRDNSKNTLFLQMNSLRVEDTAIYYCARASYNSNWSIGEYFRDWGQGTLVTVSS

SEQ ID NO: 440 - protein, 127 aa, Homo sapiens
QVQLVESGGGVVQPGRSLRLSCAASGFTFSTYGMHWVRQAPGKGLEWVAVILYDGSNRYYADSVKGRFTISRDNSKNTLYLQMNSLRAEDTAVYYCAKQGGLYCSGTNCWGGYLDYWGQGTLVTVSS

SEQ ID NO: 441 - protein, 119 aa, Homo sapiens
QITLKESGPTLVKPTQTLTLTCTVSGFSLSTSGVGVGCIRQPPGKALEWLALIYWDDDKRYSPSLKSRLTITRDTSKNQVVLTMTNMDPVDTGTYFCVHRHVSGAFDYWGQGTLVTVSS

SEQ ID NO: 442 - protein, 131 aa, Homo sapiens
QVQLVQSGSELKKPGASVKVSCKASGYTFTSYAMNWVRQAPGQGLEWMGWINTNTGNPTYAQGFTGRFVFSLDTSVNTAYLQISSLKAEDTAVYYCARARLLGYCSSTSCYTIGWGAFDIWGQGTMVTVSS

SEQ ID NO: 443 - protein, 118 aa, Homo sapiens
QVQLVESGGGVVQPGRSLRLSCAASGFTFSSYGMHWVRQAPGKGLEWVAVIWYDGSNKYYADSVKGRFTISRDNSKNTLYLQMNSLRAEDTAVYYCAREGQGTYLDYWGQGTLVTVSS

SEQ ID NO: 444 - protein, 126 aa, Homo sapiens; identical to SEQ ID NO: 322

SEQ ID NO: 445 - protein, 122 aa, Homo sapiens
QVQLVESGGGVVQPGRSLRLSCAASGFTFSRHAMHWVRQAPGKGLEWVAVISYDGSNKYYADSVKGRFAISRDNSKNTLYLQMNSLRPEDTAVYYCARDPSPLVLITSIDYWGQGTLVTVSS

SEQ ID NO: 446 - protein, 123 aa, Homo sapiens
QLQLQESGPGLVKPSETLSLTCTVSGGSISSGTYYCGWIRQPPGKGLEWIGSTYYGGSTLYNPSLRGRVTISVDTSKNQFSLKLSSVTAADTAVYYCARRGNYYDSKNWFDPWGQGTLVTVSS

SEQ ID NO: 447 - protein, 121 aa, Homo sapiens; identical to SEQ ID NO: 309

SEQ ID NO: 448 - protein, 122 aa, Homo sapiens
EVQLVESGGGLVQPGGSLRLSCAASGFTFSSSDLHWVRQATGKGLEWVSAIGTAGDTYYLGSVKGRFTISRENGKNSLYLQMNSLRAGDTAVYYCARVLYDSSGFYNWFDPWGQGTLVTVSS

SEQ ID NO: 449 - protein, 126 aa, Homo sapiens
QVQLQESGPGLVKPSQTLSLTCTVSGGSISSGGYYWSWIRQHPGKGLEWIGYISYSGSTYYNPSLKSRLTISVDTSKNQFSLKLSSVTAADTAVYYCARDLGDGYNLRVPAYFDLWGRGTLVTVSS

SEQ ID NO: 450 - protein, 118 aa, Homo sapiens
QVQLQESGPGLVKPSGTLSLTCAVSGGSISSSNWWSWVRQPPGKGLEWIGEIYHGGSTDYNPSLKSRVTISVDKSKNQFSLKLTSVTAADTAVYYCARVDHVNVRDYWGPGTLVTVSS

SEQ ID NO: 451 - protein, 128 aa, Homo sapiens; identical to SEQ ID NO: 331

SEQ ID NO: 452 - protein, 121 aa, Homo sapiens
QVQLVESGGGVVQPGRSLRLSCAASGFTFSNYGMHWVRQAPGKGLEWVAVIYYDGSNKYYADSVKGRFTISRDNSKNTLYLQIHSLRAEDTAVYYCAREGQMAATTGIDYWGQGTLVTVSS

SEQ ID NO: 453 - protein, 128 aa, Homo sapiens
EVQLVESGGGLVKPGGSLRLSCAASGFTFSNAWMSWVRQAPGKGLEWVGRIKGKTDGGTTDYAAPVKGRFTISKDDSKNTLYLQMSSLNTEDTAVYWCTTLTYYYDSSAYLNDAFDIWGQGTMVTVSS

SEQ ID NO: 454 - protein, 121 aa, Homo sapiens
EVQLVESGGGLVQPGRSLRLSCAASGFTFDDYAMHWVRQAPGKGLEWVSGISWNSDNIGYADSVKGRFTISRDIAKNSLYLQMNSLRAEDTALYYCAKGIYYDIFMPLLDWGRGTLVTVSS

SEQ ID NO: 455 - protein, 121 aa, Homo sapiens
QVQLVQSGAEVKKPGSSVKVSCKTSGDTSSSYTVGWVRQAPGQGLEWMGRIIPILGIAYSAQKFQGRLTITADKSTSTSYMELSSLRSEDTAVYYCARGVVAATPGWFDPWGQGTLVTVSS

SEQ ID NO: 456 - protein, 124 aa, Homo sapiens
QVQLVQSGAEVKKPGSSVKVSCKASGGTFGSYVISWVRQAPGQGLQWMGGIIPIFGKPNYAQKFQGRVTITADESTSTAYMELSSLRSEDTAVYYCARGWFGELLKGTYWFDPWGQGTLVTVSS

SEQ ID NO: 457 - protein, 125 aa, Homo sapiens; identical to SEQ ID NO: 285

SEQ ID NO: 458 - protein, 120 aa, Homo sapiens
EVQLVESGGGLVQPGGSLRLSCAVSGFTFSSYWMHWVRQAPGKGLVWVSRINSDGSSTSYADSVKGRFTISRDNAKNTLYLQMNSLRAEDTAVYYCAREVEQLAHMVDYWGQGTLVTVSS

SEQ ID NO: 459 - protein, 123 aa, Homo sapiens
QLQLQESGPGLVKPSETLSLTCTVSGGSISSTTYYWGWIRQPPGKGLEWIASIYYSGSTYYNPSLKSRLTVSVDTSKNQFSLKLSSVTAADTAVYYCARQWKWFGEAWYFDLWGRGTLVTVSS

SEQ ID NO: 460 - protein, 124 aa, Homo sapiens
EVQLVESGGGLVQPGGSLRLSCAASGFTFSSYWMNWVRQAPGKGLEWVANINQDGGEKYYVDSVRGRFTISRDNAKNSLYLQMNSLRAEDTAVYYCARDPYDLYGDYGGTFDYWGQGTLVTVSS

SEQ ID NO: 461 - protein, 129 aa, Homo sapiens
QVQLVQSGAAVKKPGSSVKVSCKASGGTFSSYAISWVRQAPGQGLEWMGGIVPIFGTANYAQKFQGRVTITADESTTTAYMELNSLRSEDTAVYYCAREDYYGSGSLVDPYYYYRMDVWGQGTTVTVSS

SEQ ID NO: 462 - protein, 122 aa, Homo sapiens
QVQLVESGGGVVQPGRSLRLSCAASGFTFSNYGMHWVRQAPGKGLEWVAVIWYDGSNKYYADSVKGRFTISRDNSKNTLYLQMNSLRAEDTAVYYCVRDLALFEVVIQQGVWGQGTLVTVSS

SEQ ID NO: 463 - protein, 127 aa, Homo sapiens
QLQLQESGPGLVKPSETLSLTCTVSGGSVSSRSYYWGWIRQPPGKGLEWIGSIYYSGSTYYNPSLKSRVTISVDTSKNQFSLKLSSVTAADTAVYYCARHTVDCGGDCFPNDAFDIWGQGTMVTVSS

SEQ ID NO: 464 - protein, 130 aa, Homo sapiens; identical to SEQ ID NO: 277

SEQ ID NO: 465 - protein, 121 aa, Homo sapiens
QVQLVESGGGVVQPGRSLRLSCAASGFIFSTYAMHWVRQAPGKGLEWVAVISYDGDNKYYADSVKGRFTISRDNSKNTLYLEMNSLRAEDTAVYYCARPRGGSYQTCFDYWGQGTLVTVSS

SEQ ID NO: 466 - protein, 122 aa, Homo sapiens
QVQLVQSGSELKKPGASVKVSCKASGYTFTSHTMNWVRQAPGQGLEWMGWINTNTGNPMYAQGFTGRFVFSLDTSGSTAYLQISSLKAEDTAVYYCARWGPDYGDYASNDYWGQGTLVTVSS

SEQ ID NO: 467 - protein, 129 aa, Homo sapiens; identical to SEQ ID NO: 289

SEQ ID NO: 468 - protein, 117 aa, Homo sapiens
QVQLVQSGSELKKPGASVKVSCKASGYTFTTYAMNWVRQAPGQGLEWMGWINTNTGNPTYAQDFTGRFVFSLDTSVSTAYLQISSLKAEDTAVYYCARGLVGRIDPWGQGTLVTVSS

SEQ ID NO: 469 - protein, 122 aa, Homo sapiens
QVQLVQSGAEVKKPGASVKVSCKASGYTFTNYYMHWVRQAPGQGLEWMGILNPGAGSTSYAQKFQGRVTMTSDTSTNTVYMQLSSLKSEDTAVYYCARDQQIVPHADGFDIWGQGTMVTVSS

SEQ ID NO: 470 - protein, 119 aa, Homo sapiens; identical to SEQ ID NO: 308

SEQ ID NO: 471 - protein, 121 aa, Homo sapiens; identical to SEQ ID NO: 291

SEQ ID NO: 472 - protein, 129 aa, Homo sapiens
EVQLVESGGGLVQPGGSLRLSCAASGFTFSSYWMSWVRQAPGKGLEWVANIKEDGSEKYYVDSVKGRFTISRDNAKNSLYLQMNSLRAEDTAVYYCARDVGGYSGYDLGFDYYYYMDVWGKGTTVTVSS

SEQ ID NO: 473 - protein, 126 aa, Homo sapiens
QVQLVESGGGVVQPGRSLRLACAASGFTFSSYGMHWVRQAPGKGLEWVAVISYDGNNKYYADSLKGRFTISRDDSKNTLYLQMNSLRAEDTAVYYCAKDRTAVFLFFGLGDAFDIWGQGTMVTVSS

SEQ ID NO: 474 - protein, 121 aa, Homo sapiens; identical to SEQ ID NO: 329

SEQ ID NO: 475 - protein, 123 aa, Homo sapiens
EVRLLESGGGLVQPGGSLRLSCAASGFTFTSYAMSWVRQAPGKGLQWVSTISVSGGSTYYADSVKGRFTISRDNSKNTLYLQMNSLRAEDTAVYYCAKDPASGIVGPTHFDYWGQGTLVTVSS

SEQ ID NO: 476 - protein, 121 aa, Homo sapiens; identical to SEQ ID NO: 327

SEQ ID NO: 477 - protein, 127 aa, Homo sapiens
QVQLQESGPGLVKPSQTLSLTCTVSGGSISSGDYYWSWIRQPPGKGLEWIGYIYYSGSTYYNPSLKSRVTISVDTSKNQVSLKLSSVTAADTAVYYCARFRRSYGSGSYYNISFDYWGQGTLVTVSS

SEQ ID NO: 478 - protein, 119 aa, Homo sapiens
QVQLVQSGSELKKPGASVKVSCKASGYTFTRHAMNWVRQAPGQGLEWMGWINTNTGNPTYAQGFTGRFVFSLDTSVSTAYLQISSLKAEDTAVYYCVREYGSGHPLPIWGQGTLVTVSS

SEQ ID NO: 479 - protein, 118 aa, Homo sapiens
QVQLQESGPGLVKPSETLSLTCSVSGGSIRSYFWNWVRQPPGKGLEWIGYIYYSGSTNYKPSFKSRVTISLDTSKNQISLKLSSVTAADTAVYYCARATWLRDAFGIWGQGTMVTVSS

SEQ ID NO: 480 - protein, 123 aa, Homo sapiens
QVQLVQSGAEVKKPGASVRVSCKAPGYTFTTYYIHWVRQAPGQGLEWMGIINPSAGSTTYAQKFQGRVTMTRDTSTSTVYMELSSLRSEDTAVYYCARGFHVPAALRNWFDPWGQGTLVTVSS

SEQ ID NO: 481 - protein, 125 aa, Homo sapiens
QVQLQESGPGLVKPSQTLSLTCTVSGGSISSGGYYWSWIRQHPGKGLEWIGYIYYSGSTYYNPSLKSRVTISVDTSKNQFSLKLTSVTAADTAVYYCAREANDSGSFYNGPFDYWGQGTLVTVSS

SEQ ID NO: 482 - protein, 125 aa, Homo sapiens
QVQLQESGPGLVKPSQTLSLTCTVSGGSISSGSYYWSWIRQPAGKGLEWIGRIFTSGSTNYNPSLKSRVTISVDTSKNQFSLKLSSVTAADTAVYYCARGGLLWFGGAGNYMDVWGKGTTVTVSS

SEQ ID NO: 483 - protein, 123 aa, Homo sapiens
QVQLAQSGAEVKKPGASVKVSCKAGGYTFTSYDINWVRQATGQGLEWMGWMNSNSGNAGYAQKFQGRVTMTRDTSISTAYMELSSLRSEDTAVYYCARMRTGWPTHGRPDDFWGRGTLVTVSS

SEQ ID NO: 484 - protein, 124 aa, Homo sapiens
QVQIQQWGAGVLKPSETLSLTCAVYGGSFSGHYWSWIRQPPGKGLEWIGEINHSGSTKYNPSLKSRVTISVDTSKNQFSLKLSSVTAADTAVYYCARGPPVTTFFVFSLLFDPWGQGTLVTVSS

SEQ ID NO: 485 - protein, 122 aa, Homo sapiens
QVQLVESGGGVVQPGRSLRLSCAASGFTFSSYGMHWVRQAPGKGLEWVAVISYDGRNKYYADSVKGRFTISRDNSKNTLYLQMSSLRAEDTAVYYCAKEGEWELRGNALDIWGQGTMVTVSS

SEQ ID NO: 486 - protein, 120 aa, Homo sapiens
QVQLVESGGGVVQPGRSLRLSCAASGFTFSSYGMHWVRQAPDKGLEWVAVIWYDGSNKYYADSVKGRFTISRDNSKNTLYLQMNSLRAEDTAVYYCAREGQWPNQAFDIWGQGTMVTVSS

SEQ ID NO: 487 - protein, 124 aa, Homo sapiens
QVQLQESGPGLVKPSETLSLTCTVSGGSISSSSYYWGWIRQPPGKGLEWIGSIYYSGSSYYSPSLKSRVTISADTSKNQFSLNLRSVTAADTAVYYCASGPPYMATFSYYFDYWGQGTLVTVSS

SEQ ID NO: 488 - protein, 124 aa, Homo sapiens
QVQLVESGGGLVKPGGSLRLSCAASGFTFSDYYMSWIRQAPGKGLECVSYISSSGSTIYYADSVKGRFTISRDNAKNSLYLQMNSLRAEDTAVYYCARDPIRDGVWGLNENDYWGQGTLVTVSS

SEQ ID NO: 489 - protein, 125 aa, Homo sapiens
QVQLVESGGGVVQPGRSLRLSCAASGFIFSSYAMHWVRQAPGKGLEWVAVISYDGSNKYYADSVKGRFTISRDNSKNTLYLQMNSLRAEDTAVYYCARSPPASYYNPSTGYFDYWGQGTLVTVSS

SEQ ID NO: 490 - protein, 122 aa, Homo sapiens
QVQLVQSGAEVKKPGASVKVSCKASGYTFTSHYMHWVRQAPGQGLEWMGIINPSGGSTSYAQKFQGRVTMTSDTSTSTVYMELSSLRSEDTAMYYCARDVFWVPAASSFDYWGQGTLVTVSS

SEQ ID NO: 491 - protein, 122 aa, Homo sapiens; identical to SEQ ID NO: 330

SEQ ID NO: 492 - protein, 123 aa, Homo sapiens; identical to SEQ ID NO: 281

SEQ ID NO: 493 - protein, 125 aa, Homo sapiens
QVQLQQWGAGLLKPSETLSLTCAVYGGSFSGYYWSWIRQPPGKGLEWIGEINHSGSSNYNPSLKSRVTISVDTSKNQFSLKLSSVTAADTAVYYCARGWGWGAVAGRAEYYFDYWGQGTLVTVSS

SEQ ID NO: 494 - protein, 121 aa, Homo sapiens
QVQLVESGGGVVQPGRSLRLSCAASGFTFSSYAMHWVRQAPGKGLEWVAVISYDGYNKYYADSVKGRFTISRDNSKNTLYLQMNSLRAEDTAVYYCARAQGGNYYYGMDVWGQGTTVTVSS

SEQ ID NO: 495 - protein, 119 aa, Homo sapiens
QVQLQESGPGLVKPSQTLSLTCTVSGGSISSGSYYWSWIRQPAGKGLEWIGRVYIYSSGSTNYNPSLKSRVTISVDTSKNQFSLKLSSVTAADTAVYYCARGAASFDYWGQGTLVTVSS

SEQ ID NO: 496 - protein, 126 aa, Homo sapiens
QLQLQESGPGLVKPSETLSLTCTVSGGSISSSSNYWGWIRQPPGKGLEWIGSIYYSGSTYYNPSLKSRVTISVDTSKNQFSLKLSSVTAADTAVYYCARDPRVVVTARMYNWFDPWGQGTLVTVSS

SEQ ID NO: 497 - protein, 128 aa, Homo sapiens
QVQLQESGPGLVKPSETLSLTCTVSGGSLSSYYWSWIRQPPGKGLEWIGYIYDSGGASRSTNYNPSLKSRVTISVDTSRNQLSLKLSSVTAADTAVYYCARDQRQFQLLGRFGWFDPWGQGTLVTVSS

SEQ ID NO: 498 - protein, 123 aa, Homo sapiens; identical to SEQ ID NO: 459

SEQ ID NO: 499 - protein, 125 aa, Homo sapiens
QVQLVQSGSELKKPGASVKVSCKASGYTFTTYAMNWVRQAPGQGLEWMGWINTNTGNPTYAQGFTGRFVFSLDTSVNTAFLHIGSLKAEDTAVYYCARDQDSGYPTYYYYYMDVWGKGTTVTVSS

SEQ ID NO: 500 - protein, 128 aa, Homo sapiens
QVQLVQSGAEVKKPGASVKVSCKASGYTFTSYDMNWVRQATGQGLEWMGWMNPNSGNTGYAQKFQGRVTMTRNTSISTAYMELSSLRSEDTAVYYCARGGIYYLVRGFIIGYYGMDVWGQGTTVTVSS

SEQ ID NO: 501 - protein, 122 aa, Homo sapiens
EVALVESGGGLVKPGGSLRLSCAASGFIFSNAWMTWVRQAPGKGLEWVGRIKSKSEGGTPEYAAPVKGRFIISRDDSTNSLHLQMNYLRIEDTAVYYCTTGGYSSYAASDYWGQGTLVTVSS

SEQ ID NO: 502 - protein, 124 aa, Homo sapiens
EVQLVESGGGLVQPGGSLRLSCAASGFTFSSYSMNWVRQAPGKGLEWVSYISSRSSTIKYADSVKGRFTISRDNAKNSLYLQMNSLRDEDTAVYYCARVDYYGSGSVYWYFDLWGRGTLVTVSS

SEQ ID NO: 503 - protein, 121 aa, Homo sapiens
EVQLVESGGGLVQPGRSLRLSCAASGFTFDDYAMHWVRQAPGKGLEWVSGISWNSGSIAYADSVKGRFTISRDNAKNSLYLQMNSLRAEDTALYFCAKVGWELSIDAFDLWGQGTMVTVSS

SEQ ID NO: 504 - protein, 120 aa, Homo sapiens; identical to SEQ ID NO: 317

SEQ ID NO: 505 - protein, 120 aa, Homo sapiens
QVTLRESGPALVKPTQTLTLTCTFSGFSLSTSGMCVSWIRQPPGKALEWLARIDWDDDKYYSTSLETRLTISKDTSKNQVVLTMTNMDPVDTATYYCARIQYQLNGMDVWGQGTTVTVSS

SEQ ID NO: 506 - protein, 130 aa, Homo sapiens
QVQLVQSGAEVKKPGASVKVSCKASGYTFSSYDINWVRQATGQGLEWMGWVNPNSGHTGYAQKFQGRVTMTRNTSVSTAYMELSSLRSEDTAVFYCARGRVGYVGSGSRGYYYYYDMDVWGQGTTVTVSS

SEQ ID NO: 507 - protein, 124 aa, Homo sapiens; identical to SEQ ID NO: 326

SEQ ID NO: 508 - protein, 119 aa, Homo sapiens
QVQLVQSGSALKKPGASVKVSCKASGYTFTSYAMNWVRQAPGQGLEWMGWINTNTGNPTYAQGFTGRFVFSLDTSVSTAYLQISSLKAEDTAVYYCARGRSYGLSLGYWGQGTLVTVSS

SEQ ID NO: 509 - protein, 120 aa, Homo sapiens
QVQLVESGGGVVQPGRSLRVSCAASGFTFSSHGMHWVRQAPGKGLEWVSVIWYDGSNKYYADSVKGRFTISRDNSKNTLSLQMNSLRAEDTAVYYCARESADISSRLDYWGRGTLVTVSS

SEQ ID NO: 510 - protein, 120 aa, Homo sapiens; identical to SEQ ID NO: 317

SEQ ID NO: 511 - protein, 123 aa, Homo sapiens
EVQLVESGGGLVQPGGSLRLSCAASGFILSDHYMDWVRQAPGKGLEWVGRTRNKANSYTTEYAASVKGRFTISRDDSKNSLYLQMNSLKTEDTAVYYCASVITFGGVIVRSYWGQGTLVTVSS

SEQ ID NO: 512 - protein, 122 aa, Homo sapiens
QVQLVQSGAEVKKPGSSVKVSCKASGGTFSSYAISWVRQAPGQGLEWMGGIIPVFGTTNYAQKLQGRVTISADESTSTAYMEVSSLRSEDTAVYYCARVSGYGDYGAYSDYWGQGTLVTVSS

SEQ ID NO: 513 - protein, 121 aa, Homo sapiens
EVQLVESGGGLVQPGGSLRLSCVASEFTFSSYWMSWFRQAPGKGLEWVSGINWNGGSTGYADSVKGRFTISRDNAKNSLYLQMNSLKTEDTAVYYCASVITFGGVIVRSYWGQGTLVTVSS

SEQ ID NO: 514 - protein, 128 aa, Homo sapiens; identical to SEQ ID NO: 381

SEQ ID NO: 515 - protein, 121 aa, Homo sapiens; identical to SEQ ID NO: 319

SEQ ID NO: 516 - protein, 120 aa, Homo sapiens
QVQLVESGGGVVQPGRSLRLSCAASGFTFSSYLMHWVRQAPGKGLEWVAVIWANGNRYYADSVKGRFTISRDISKNTLYLQMNSLRAEDTAMYYCARDYCNGVTCNSNYWGQGTLVTVSS

SEQ ID NO: 517 - protein, 115 aa, Homo sapiens
QVQLQESGPGLVKPSGTLSLTCAVSGGSISSSNWWSWVRQPPGKGLEWIGEIYHSGSTNYNPSLKSRVTISVDKSKNQFSLKLSSVTAADTAVYYCARGWYFDYWGQGTLVTVSA

SEQ ID NO: 518 - protein, 124 aa, Homo sapiens
QVQLVQSGAEVKKPGSSVKVSCKASGGTFHNYAISWVRQAPGQGLEWMGGFIPILGTTNYAQKFQGRVTITADESTSTAYMELSSLRSEDTAVYYCARVEGEGVDSYYYGMDVWGQGTTVTVSS

SEQ ID NO: 519 - protein, 121 aa, Homo sapiens; identical to SEQ ID NO: 291

SEQ ID NO: 520 - protein, 123 aa, Homo sapiens
QLQVVQSGPGLVKPSETLSLTCTVSGDPVINTNYYWGWIRQPPGKGLEWIGTLSYSGGTHYNPSLSSRVTIAVDSSKKRFSLTLRSVTAADTAIYYCARHPVDGYNYGYSDLWGQGTLVTVSS

SEQ ID NO: 521 - protein, 130 aa, Homo sapiens; identical to SEQ ID NO: 277

SEQ ID NO: 522 - protein, 121 aa, Homo sapiens
QVQLVESGGGVVQPGRSLRLSCAASGFTFSSYAMHWVRQAPGKGLEWVAVISYDEINKYYADSVKGRFTISRDNSKTTLDLQMNSLRAEDTAVYYCARAGGGSYRGPFDYWGQGTLVTVSS

SEQ ID NO: 523 - protein, 121 aa, Homo sapiens
QVQLVESGGGVVQPGRSLRLSCAASGFTFSTYAMHWVRQAPGKGLEWVTVISYDGSNKYYADSVKGRFTISRDNSKNTLYLQMNSLRAEDTAVYYCAKSYNGNYYDAFDIWGQGTMVTVSS

SEQ ID NO: 524 - protein, 121 aa, Homo sapiens
QVQLVESGGGVVQPGRSLRLSCAASGFTFSSYGMHWVRQAPGKGLEWVAVISYDGSNKYYADSVKGRFTISRDNAKNSLYLQMNSLRAEDTAVYYCARGSAGNYYYGMDVWGQGTTVTVSS

SEQ ID NO: 525 - protein, 127 aa, Homo sapiens
EVQLVQSGAEVKKPGESLKISCKGSGYSFSDYWIGWVRQMPGKGLEWMGIIYPGDSDTRYSPSFQGQVTISADKSISTAYLQWSSLKASDTAMYYCARLTFGGSGSYYFYYNGMDVWGQGTTVTVSS

SEQ ID NO: 526 - protein, 125 aa, Homo sapiens
EVQLVESGGGLVQPGGSLRLSCAASGFTFSSYDMHWVRQATGKGLEWVSAIGTAGDTYYPGSVKGRFTISRENAKNSLYLQMNSLRAGDTAVYYCARADPYQLLGQHYYYGMDVWGQGTTVTVSS

SEQ ID NO: 527 - protein, 127 aa, Homo sapiens; identical to SEQ ID NO: 324

SEQ ID NO: 528 - protein, 126 aa, Homo sapiens; identical to SEQ ID NO: 351

SEQ ID NO: 529 - protein, 121 aa, Homo sapiens
QVQLVESGGGVVQPGRSLRLSCAASGFTFSIYGMHWVRQAPGKGLEWVAVISFDGSNKYYADSVKGRFTISRDNSKNTLYLQMNSLRAEDTAVYYCAKDGSGSYYGWFDPWGQGTLVTVSS

SEQ ID NO: 530 - protein, 121 aa, Homo sapiens
QVQLVQSGAEVKKPGSSVKVSCKASGGTFSSYAINWVRQAPGQGLEWMGGIIPIFGTANYAQKFQGRVTFTADESTSTAYMEVSSLRSEDTAVYYCARSCGDCYSADLDFWGQGTLVTVSS

SEQ ID NO: 531 - protein, 120 aa, Homo sapiens
QLQLQESGPGLVKPSETLSLTCTVSGGSISSSSYYWGWIRQPPGKGLEWIGSMYYSGSTYYNPSLKSRVTISVDTSKNQFSLKLSSVTAADTAVYYCARLLWLRGHFDYWGQGTLVTVSS

SEQ ID NO: 532 - protein, 129 aa, Homo sapiens; identical to SEQ ID NO: 287

SEQ ID NO: 533 - protein, 117 aa, Homo sapiens
QVQLVESGGGVVQPGRSLRLSCAASGFTFSFYAIHWVRQAPGQGLEWAAAISSDGTYKYYADSVKGRFTISRDNSKNTSYLQMNSLRAEDTAVYYCARALNKGFDPWGQGTLLTVSS

SEQ ID NO: 534 - protein, 123 aa, Homo sapiens; identical to SEQ ID NO: 284

SEQ ID NO: 535 - protein, 127 aa, Homo sapiens
QVQLVQSGAEVKKPGASVQVSCEASGYTFTTYYMHWVRQAPGQGLEWMGIINPSGGSTTYAQKFQGRVTMTRDTSTSTVYMDLSSLRSEDTAVYYCARDRLGDGSYLGGGYYGMDVWGQGTTVTVSS

SEQ ID NO: 536 - protein, 123 aa, Homo sapiens
QVQLVQSGAEVKKPGASVKVSCQASGYTFTSYDINWVRQATGQGLEWMGWMKSNSGNTGYAQKFQGRVTMTRNTSISTAYMELTSLRSEDTAVYYCARMRSGWPTHGRPDDLWGRGTLVTVSS

SEQ ID NO: 537 - protein, 127 aa, Homo sapiens
QVQLVQSGAEVKRPGSSVKVSCKASGGTFSSYTISWVRQAPGQGLEWMGRIIPILAVANYAQKFQGRVTITADKSTSTAYMELSSLRSEDTAVYYCARDHSGYYDSTSLMSPFFDYWGQGTLVTVSS

SEQ ID NO: 538 - protein, 124 aa, Homo sapiens
QVQLVQSGAEVKKPGASVKVSCKASGYTFTSHYMHWVRQAPGQGLEWMGIINPSGGSTSYAQKFQGRVTMTGDTSTSTVYMELSSLRSEDTAVYYCARDLAGVPAALGCWFDPWGQGTLVTVSS

SEQ ID NO: 539 - protein, 127 aa, Homo sapiens
QVQLVESGGGVVQPGRSLRLSCAASGFTFSTYAMHWVRQAPGKGLEWVAVISYDGGNKYYADSVKGRFTISRDNSKNTLYLQMNSLRAEDTAVYYCAKNLGPYCSGGTCYSLVGDYWGQGTLVTVSS

SEQ ID NO: 540 - protein, 119 aa, Homo sapiens
EVQLVESGGGLVQPGGSLRLSCAASGFTFSSYDMHWVRQATGKGLEWVSAIGTAGDTYYPGSVKGRFTISRENAKNSLYLQMNSLRAGDTAVYYCARARGGYNWNFDYWGQGTLVTVSS

SEQ ID NO: 541 - protein, 120 aa, Homo sapiens
QVQLVESGGGVVQPGRSLRLSCAASGFTFSSYAMHWVRQAPGKGLEWVAVISYDGSYKYFADSVKGRFTISRDNSKNTLYLQMNSLRAEDTAVYYCARDQGTVVTHFDYWGQGTLVTVSS

SEQ ID NO: 542 - protein, 127 aa, Homo sapiens; identical to SEQ ID NO: 288

SEQ ID NO: 543 - protein, 123 aa, Homo sapiens
QVQLVQSGAEVKKPGASVKVSCKASGYTFTSYDINWVRQATGQGLEWMGWMSPNSGNTGYAQKFQGRVTMTRDTSISTAYMELNSLRSEDTAVYYCARMRSGWPTHGRPDDHWGQGTLVTVSS

SEQ ID NO: 544 - protein, 127 aa, Homo sapiens
EVQLVESGGGVVQPGGSLRLSCAASGFTFDDYAMHWVRQAPGKGLEWVSLISGDGGNTYYADSVKGRFTISRDNSKNSLYLQMNSLRTEDTALYYCAKDEMAYPPSHHYYYYYMDVWGKGTTVTVSS

SEQ ID NO: 545 - protein, 123 aa, Homo sapiens
QVQLVQSGAEVKTPGASVKVSCKASGYTFTSYDINWVRQATGQGPEWMGWMNPNSGNTGYAHKFQGRVTMTRNTSISTAYMELSSLRSEDTAVYYCARGPSILTGFYNPLDYWGQGTLVTVSS

SEQ ID NO: 546 - protein, 130 aa, Homo sapiens
QLQLQESGPGLVKPSETLSLTCTVSGGSISSSNYYWGWIRQPPGKGLEWIGTIHYSGISYYNPSLKSRVTISVDTSNNKFSLELSSVTAADTAVYFCARRTYYDLWSAYSSTAYYCMDVWGKGTTVTVSS

SEQ ID NO: 547 - protein, 122 aa, Homo sapiens
QVRLVQSGAEVKKPGSSVKVSCKASGGTFSDYAISWVRQAPGQGLEWMGGIIPIFGTANYAQKFQGRVTITADEFTITAYMELSSLRSEDTAVYYCARLSGSGWLGYAMDVWGQGTTVTVSS

SEQ ID NO: 548 - protein, 117 aa, Homo sapiens
QVQLVESGGGVVQPGRSLRLSCAASGFTFSSYAMHWVRQAPGKGLEWVAVISNDGRNKYYADSVKGRLTISRDNSKNTLYLQMNSLRAEDTAVYYCARPSNWYFDLWGRGTLVTVSS

SEQ ID NO: 549 - protein, 127 aa, Homo sapiens
EVQLVESGGGLVQPGRSLTLSCAASGFTFDDYTMHWVRQAPGKGLEWVSGIDWNGGTIGYADSVKGRFTISRDNAKNSLYLQMNSLRAEDTALYYCAKAGYYAYVWGSYRFEYFDNWGQGTLVTVSS

SEQ ID NO: 550 - protein, 117 aa, Homo sapiens
EVQLVESGGGLVQPGGSLRLSCAASGVTVSSNYMSWVRQAPGKGLEWVSLIYSGGSTFYADSVKGRFTISRHNSKNTLYLQMNSLRPEDTAVYYCARGPEPDAFDIWGQGTMVTVSS

SEQ ID NO: 551 - protein, 122 aa, Homo sapiens; identical to SEQ ID NO: 302

SEQ ID NO: 552 - protein, 127 aa, Homo sapiens
QVQLVESGGGVVQPGRSLRLSCAASGFTFSDYAMHWVRQAPGKGLEWVADISFDGSNKYYADSVKGRFTISRDSSENTLYLQMDSLRADDTAVYYCARDLSTTWYLEMWGPDAFDIWGQGTVVTVSS

SEQ ID NO: 553 - protein, 127 aa, Homo sapiens
QVQLVESGGGVVQPGRSLRLSCAASGFTFRRYGMYWVRQAPGKGLEWVAVISYDGTDKYYTDSVKGRFTISRDNSKNTLYLQMNSLRAEDTAVYYCAKKGGPYCGGGNCYAGYFDYWGQGTLVTVSS

SEQ ID NO: 554 - protein, 122 aa, Homo sapiens; identical to SEQ ID NO: 283

SEQ ID NO: 555 - protein, 127 aa, Homo sapiens
EVQVVESGGGLVQPGRSLRLSCVSSGFIFDDYVMHWVRQRPGKGLEWVAGITYNGGILGYGDSVKGRFIIARDNVRGFLSLQMGDLRTEDTALYYCARDYCSSTTCPAETYYYMDVWGKGTAVTVSS

SEQ ID NO: 556 - protein, 116 aa, Homo sapiens; identical to SEQ ID NO: 297

SEQ ID NO: 557 - protein, 120 aa, Homo sapiens
EVQLVESGGGLVQPGGSLRLSCAASGFTFSSYDMHWVRQATGKGLEWVSTIGTAGDTYYPDSVKGRFTISRENAKNSLFLQMNSLRAGDTAVYYCARVDFDILTGYYSNWGQGTLVTVSS

SEQ ID NO: 558 - protein, 122 aa, Homo sapiens
EAQLLESGGALVQPGGSLRLSCAASGFTFSCCAMGWVRQAPGRGLEWVSSIHDDGVGTFYAVSVKGRFSISRDNSKNTVYLQMNGLRAEDTGVYYCAKWAGPIVMKYYLQYWGQGALVTVSS

SEQ ID NO: 559 - protein, 123 aa, Homo sapiens
EVQLVESGGGLVQPGGSLRLSCAASGFTFSSYDMHWVRQATGKGLEWVSAIGTAGDTYYPDSVKGRFTISRENAKNSLYLQMNSLRAGDTAVYYCARGGDSGYDLGAWYFDLWGRGTLVTVSS

SEQ ID NO: 560 - protein, 119 aa, Homo sapiens
EVQLVQSGAEVKKPGESLKISCKGSGYSFTNYWIGWVRQMPGKGLEWMGIIYPGDSDTRYSPSFQGQVTISADKSISTAYLQWSSLKASDTAMYYCARTPTLYNWFHPWGQGTPVTVSS

SEQ ID NO: 561 - protein, 120 aa, Homo sapiens
QVTLRESGPALVKPTQTLTLTCTFSGFSLSTSGLCVSWIRQPPGKALEWLARIDWDDDKYYNTSLRTRLTISKDTSKNQVVLTMTNMDPVDTATYYCARATTFFYGMDVWGQGTTVTVSS

SEQ ID NO: 562 - protein, 125 aa, Homo sapiens
QLQLQESGPGLVKPSETLSLTCTVSGGSISSSSYYWGWIRQPPGKGLEWIGSIYYSGITYYNPSLKSRVTISVDTSKNQFSLKLSSVTAADTAVYYCARHQRYCSSSSCHVWDYWGQGTLVTVSS

SEQ ID NO: 563 - protein, 121 aa, Homo sapiens; identical to SEQ ID NO: 280

SEQ ID NO: 564 - protein, 122 aa, Homo sapiens; identical to SEQ ID NO: 282

SEQ ID NO: 565 - protein, 129 aa, Homo sapiens
QVQLVESGGGVVQPGRSLRLSCAASGFTFSSYAMHWVRQAPGKGLEWVAVISYDGSNKYYADSVKGRFTISRDNSKNTLYLQMNSLRAEDTAVYYCARDDNSPQGSGWYFYYYYAMDVWGQGTTVTVSS

SEQ ID NO: 566 - protein, 124 aa, Homo sapiens; identical to SEQ ID NO: 307

SEQ ID NO: 567 - protein, 119 aa, Homo sapiens
EVQLVESGGGLVQPGGSLRLSCAASGFTFSSYWMTWVRQAPGKGLEWVANIKQDGSEKYYVDSVKGRFTISRDNAKNSLSLQMNSLRVEDTAVYYCVRLGVSSWYFDYWGQGTLVTVSS

SEQ ID NO: 568 - protein, 133 aa, Homo sapiens
EVQLVESGGDLVQPGGSLRLTCAASGFTFSSHWMTWVRQAPGKGLEWVANIKEDGREKYYVDSVKGRLTISRDNAKNSLYLQMNSLRAEDTAVYYCARVVVEVATNKGIHGVDYYYYYYMDVWGKGTTVTVSS

SEQ ID NO: 569 - protein, 121 aa, Homo sapiens
QVQLQQWGAGLLKPSETLSRTCAVYGASFSNYYWSWIRQPPGKGLEWIGEINHSENTNYNPSLKSRVTISVDTSKNQFSLRLSSVTAADTAVYYCARLRYSSSGGHIFDYWGQGTLVTVSS

SEQ ID NO: 570 - protein, 125 aa, Homo sapiens
QVQLVQSGAEVKKPGSSVKVSCKASGGTFSSYAISWVRQAPGQGLEWMGGIIPIFGTANYAQKFQGRVTITADESTSTAYMELSSLRSEDTAVYYCARGLTGSSAYKDEIYFDYWGQGTLVTVSS

SEQ ID NO: 571 - protein, 127 aa, Homo sapiens
QVQLQESGPGLVKPSETLSLTCTVSGGSISSYYWSWIRQPPGKGLEWIGYIYYSGSTKYNPSLKSRVTISVDTSKNQFSLKLSSVTAADTAVYYCARDGGNAYSSGWYRYYYHMDVWGKGTTVTVSS

SEQ ID NO: 572 - protein, 122 aa, Homo sapiens; identical to SEQ ID NO: 296

SEQ ID NO: 573 - protein, 123 aa, Homo sapiens; identical to SEQ ID NO: 480

SEQ ID NO: 574 - protein, 122 aa, Homo sapiens; identical to SEQ ID NO: 282

SEQ ID NO: 575 - protein, 124 aa, Homo sapiens
EAQLVESGGGLVQPGGSLRLSCEASGFIFSSYWMSWVRQAPGKGLEWVANIKQDGSEKYYVDSVKGRFTISRDNAKNSLYLQMNSLRAEDTAVYYCARVNDGRPNPLEYYFDYWGQGTLVTVSS

SEQ ID NO: 576 - protein, 124 aa, Homo sapiens
QVQLQESGPGLVKPSQTLSLTCTVSGDSISSGRYYWSWIRQHPGKGLEWIGFVYYSGSTYYNPSLKSRVTISVDTSKNQFSLRLSSVTAADTAVYYCARETYSAYEMPPYFDYWGQGTLVTVSS

SEQ ID NO: 577 - protein, 128 aa, Homo sapiens
EVQLVQSGAEVKKPGESLKISCKGSGYSFTSYWIGWVRQMPGKGLEWMGIIQPGDSDTRYSPSFQGQVTMSADKSTSTAYLQWSSLKASDTAMYYCARDLIIESTIAARPGYYGMDVWGQGTTVTVSS

SEQ ID NO: 578 - protein, 119 aa, Homo sapiens
QVHLVQSGAEVKKPGASVKLSCKASGYTFTNYLLHWVRQAPGQGLEWMGNVNPSRGTATYPQKLDDRVTMTSDKSASTIYMELSGLRSEDTAIYYCARERSGTYFFDYWGQGTLLTVSS

SEQ ID NO: 579 - protein, 119 aa, Homo sapiens
QVTLRESGPALVKPTQTLTLTCTFSGFSLTTSGMCVSWIRQPPGKALEWLARIDWDDDKYYSTSLQTRLTISKDTSKNQVVLTMTNMDPVDTATYYCARETPVTAIDYWGQGTLVTVSS

SEQ ID NO: 580 - protein, 123 aa, Homo sapiens
QVQLVQSGAEVKKPGSSVKVSCKASGFTFMSSAVQWVRQARGQRLEWIGWIVIGSGNTNYAQKFQERVTITRDMSTSTAYMELSSLRSEDTAVYYCAAPYCSSISCNDGFDIWGQGTMVTVSS

SEQ ID NO: 581 - protein, 123 aa, Homo sapiens
QVQLVQSGAEVKKPGASVKVSCKVSGYTFTGYVVHWVRQAPGQDLEWMGWINTGYGNTKYSQKFQGRVTISWDTSATTAYMELSNLKSEDKAVYYCASMTRMSEQTYYGMDVWGQGTTVTVSS

SEQ ID NO: 582 - protein, 115 aa, Homo sapiens
QVQLVESGGGVVQPGRSLRLSCAASGFTFSSFAMHWVRQAPGKGLEWVAVISYDGSNKYYADSVKGRFTISRDNSKNTLYLQMNSLRAEDTAAYYCARELMSVGWGQGTLVTVSS

SEQ ID NO: 583 - protein, 123 aa, Homo sapiens
EVQLVESGGGLIQPGGSLRLSCAASGITVSSNYMSWVRQAPGKGLEWVSVIYAGGSTYYADSVKGRFTISRDNSKNTLYLQMNSLRAEDTAVYYCARDALYYNGPGRDGMDVWGQGTTVTVSS

SEQ ID NO: 584 - protein, 123 aa, Homo sapiens; identical to SEQ ID NO: 583

SEQ ID NO: 585 - protein, 126 aa, Homo sapiens
QVQLVESGGGVVQPGRSLRLSCAASGFTFSSYGMHWVRQAPGKGLEWVAVISSDGSNKYYAGSVKGRFTISRDNSKNTLYLQMNSLRAEDTAVYYCAKDMVEPLFSHYYYYGMDVWGQGTTVTVSS

SEQ ID NO: 586 - protein, 123 aa, Homo sapiens; identical to SEQ ID NO: 336

SEQ ID NO: 587 - protein, 128 aa, Homo sapiens
EVQLVESGGGLVQPGGSLRLSCAASGFTFRSYDMHWVRQVTGKGLEWVSTIGTAGDTYYPGSVKGRFTISRENAKNSLYLQMNSLRAGDTAVYYCARVFETKVIRGGRYYYYYYMDVWGKGTTVTVSS

SEQ ID NO: 588 - protein, 122 aa, Homo sapiens
QVQLQQWGAGLLKPSETLSLTCAVYGGSFSGYYWSWIRQPPGKGLEWIGEINHSGSTNYNPSLKSRVTISVDTSKNHFSLKMNSVTAADTAVYYCARCRQMGNFYYYYMDVWGKGTTVTVSS

SEQ ID NO: 589 - protein, 123 aa, Homo sapiens
QVQLQESGPGLVKPSQTLSLTCTVSGDSISSAGYYWSWIRQHPGKGLEWIGYIYYSGRTYYNPSLKSRVTMSVDTSKNQFSLRLRSVTAADTAVYYCARVVPTRGPVAWFDPWGQGTLVTVSS

SEQ ID NO: 590 - protein, 128 aa, Homo sapiens; identical to SEQ ID NO: 339

SEQ ID NO: 591 - protein, 124 aa, Homo sapiens
QVQLVQSGAEVKKPGSSVKVSCKTAGGTSSSYAISWVRQAPGQGLEWMGRIIPILGVAIYAQKFQGRVTITADKSTSTAYMELNSLRSEDTAVYYCTTTQGGDYGDNLYYLDYWGQGTLVTVSS

SEQ ID NO: 592 - protein, 117 aa, Homo sapiens; identical to SEQ ID NO: 550

SEQ ID NO: 593 - protein, 123 aa, Homo sapiens
QVQLVQSGAEVKKPGASVKVSCKASGDTFTTYYIHWVRQAPGQGLEWMGIINPSGGSRSYAQKFQGRISMTSDTSTSTVYMELSSLRSEDTAVYYCARGYGFVPNVLYYFDYWGQGTLVTVST

SEQ ID NO: 594 - protein, 120 aa, Homo sapiens
EVQLVESGGGLVKPGGSLRLSCAASGFTFRDYSMNWVRQAPGKGLEWVSSISSGGSYIYYADSVKGRFTISRDNAKNSLYLQMNSLRAEDTAVYYCARGGSILWWLIDYWGQGTLVTVSS

SEQ ID NO: 595 - protein, 123 aa, Homo sapiens
EVQLLESGGGLVQPGGSLRLSCAASGFTFTSYAMSWVRQAPGKGLEWVSGISISGGSTYYAASVKGRFTISRDNSKNTLYLQMNSLRAEDTAVYYCAKDSRSGIAGVDAFDIWGQGTMVTVSS

SEQ ID NO: 596 - protein, 119 aa, Homo sapiens
EVQLVESGGGLVQPGGSLRLSCAASGLTVSSNYMSWVRQAPGKGLECVSVIYAGGNTYYADSVKGRFTISRDNSKNTLYLQMNSLRAEDTAVYYCARGDGGYYSPFDYWGQGTLVTVSS

SEQ ID NO: 597 - protein, 127 aa, Homo sapiens
QITLKESGPTLVKPTQTLTLTCTFSGFSLSTSGVGVAWIRQPPGKALEWLALIYWDDDKRYSPSLKSRLTITKDTSKNQVVLTMTNMDPVDTATYYCAHRLPTPQLLPSFENWFDPWGQGTLVTVSS

SEQ ID NO: 598 - protein, 116 aa, Homo sapiens
EVQLVESGGGLVQPGGSLRLSCAASGLTVGSNYMNWVRQAPGKGLEWVSVIYSGGSTFYADSVKGRFTISRDNSKNTLYLQLNSLRAEDTAVYYCAREVVGYFDCWGQGTLVTVSS

SEQ ID NO: 599 - protein, 118 aa, Homo sapiens
QVQLQESGPGLVKPSETLSLTCTVSGGSISSYYWSWIRQPPGKGLEWIGHIYYTGSSYYNPSLKSRVTISLDTSKNQFSLKLNSVTAADTAVYYCARLRWLRGGIDFWGQGTLVIVSS

SEQ ID NO: 600 - protein, 123 aa, Homo sapiens
QVQLVQSGAEVKKPGASVKVSCKASGDTFTTYYIHWVRQAPGQGLEWMGIINPSGGSRSYAQKFQGRISMTSDTSTSTVYMELSSLRSEDTAVYYCARGYGFVPNVLYYFDYWGQGILVTVSS

SEQ ID NO: 601 - protein, 121 aa, Homo sapiens
QVELVESGGGVVQPGRSLRLSCAASGFIFSSYAMHWVRQAPGKGLEWVAVISYDGGNKYYADSVKGRFTISRDNSKNTLYLQMNSLRAEDTAVYYCARAQGGNYYYGMDVWGQGTTVTVSS

SEQ ID NO: 602 - protein, 132 aa, Homo sapiens
QVQLVESGGGVVQPGRSLRLSCAASGFTFSRYAMYWVRQAPGKGLEWVALISYDGRNEYYADSVKGRFTISRDNSKNTLYLQMNSLRAGDSAVYYCARDLAYHPYRDYGDDDYYYYYGMDVWGQGTTVTVSS

SEQ ID NO: 603 - protein, 122 aa, Homo sapiens
QVQLVQSGAEVKKPGASVKVSCKASGYTFTSYYMHWVRQAPGQGLEWMGIINPGGGSTTYAQKFQGRVTMTSDTSTSTVYMELSSLRSEDTAMYYCARGAIPPNSRAEIDYWGQGTLVTVSS

SEQ ID NO: 604 - protein, 128 aa, Homo sapiens
QVQLVQSGAEVKKPGASVKVSCKASGYTFTSYYLHWVRQAPGQGLEWMGIINPSGGSTTYAQKFQGRVTMTRDTSTSAVYMELRSLRSEDTAVYYCARENDYGDYVEPRDYYYGMDVWGQGTTVTVSS

SEQ ID NO: 605 - protein, 124 aa, Homo sapiens
QVQLVESGGGVVQPGRSLRLSCAASGFTFSTYGMHWVRQAPGKGLEWVAVIWYDGNKKYCADSVKGRCTISRDNSKNTLYLQMNSLRAEDTAVYYCAREGPFGDREASGAFDVWGQGTMVTVSS

SEQ ID NO: 606 - protein, 120 aa, Homo sapiens
QVQLVESGGGLVKPGGSLRLSCAASGFTFSDYYMSWIRQAPGKGLEWVSYISSSGITIYYADSVKGRFTISRDNAKNSLYLQMNSLRAEDTAVYYCTGVVAAPAEYFQHWGQGTLVTVSS

SEQ ID NO: 607 - protein, 119 aa, Homo sapiens; identical to SEQ ID NO: 293

SEQ ID NO: 608 - protein, 118 aa, Homo sapiens; identical to SEQ ID NO: 337

SEQ ID NO: 609 - protein, 121 aa, Homo sapiens
QVQLVQAGAEVKKPGASVKVSCKASGYTFTSYYMHWVRQAPGQGLEWMGIINPSGGSTSYAQKFQGRVTMTRDTSTSTVYMELSSLRSEDTAVYYCARGAAVPAAGEFDYWGQGTLVTVSS

SEQ ID NO: 610 - protein, 121 aa, Homo sapiens
QVQLVESGGGVVQSGGSLRLSCAASGFTFSTYGMHWVRQAPGKGLEWVAIISYDGINKYYADSVKGRFTISRDNSKNTVYLQMNSLRTEDTAMYYCAKGDGSYLMDYFDYWGQGTLVTVSS

SEQ ID NO: 611 - protein, 122 aa, Homo sapiens; identical to SEQ ID NO: 282

SEQ ID NO: 612 - protein, 122 aa, Homo sapiens
QVQLQQWGAGLLKPSETLSLTCAVYGGSFSGYYWSWIRQPPGKGLEWIGEINHSGSTNYNPSLKSRVTISVDTSKNHFSLKMNSVTAADTAVYYCARCRQMGNFYYYYMDVWGKGTTVTVSP

SEQ ID NO: 613 - protein, 125 aa, Homo sapiens
EVQLVQSGAEVKKPGESLKISCKGSGYSFTSYWVGWVRQMPGKGLEWMGIIYPGDSDTRDSPSFQGQVTISADKSISTAYLQWSSLKASDTAMYYCARLGSESKIDYYYYGMDVWGQGTTVTVSS

SEQ ID NO: 614 - protein, 124 aa, Homo sapiens; identical to SEQ ID NO: 279

SEQ ID NO: 615 - protein, 123 aa, Homo sapiens
QLQLRESGPGLVKPSETLSLTCTVSGGSISSSSYYWGWIRQPPGKGLEWIGSIYYSGSTYYNPSLKSRVTISVDTSKNQFSLKLSSVTAADTAVFYCARMSRGYNYAYTFDIWGQGTMVTVSS

SEQ ID NO: 616 - protein, 120 aa, Homo sapiens
QVTLRESGPALVKPTQTLTLTCTFSGFSLSTSGMCLSWIRQPPGKALEWLARIDWDDDKYYSTSLETRLTISKDTSKNQVVLTMTNMDPVDTGTYYCARTMATINAFDIWGQGTMVTVSS

SEQ ID NO: 617 - protein, 119 aa, Homo sapiens; identical to SEQ ID NO: 320

SEQ ID NO: 618 - protein, 118 aa, Homo sapiens
QVQLVQSGSELKKPGASVKVSCKASEYTFTSYAMNWVRQAPGQGLEWMGWINTNTGNPTYAQGFTGRFVFSLDTSVSTAYLQISSLKAEDTAVYYCARPGKAAAFDYWGQGTLVTVSS

SEQ ID NO: 619 - protein, 128 aa, Homo sapiens
QVQLVESGGGVVQPGRSLRLSCAASGFTFSSYGMHWVRQAPGKGLEWVAVIWYDGSNKYYAESVKGRFTISRDNSKNTLYLQMNSLRAEDTAVYYCARDLHQDWVVVVAANVYGMDVWGQGTTVTVSS

SEQ ID NO: 620 - protein, 123 aa, Homo sapiens; identical to SEQ ID NO: 325

SEQ ID NO: 621 - protein, 120 aa, Homo sapiens
QVTLRESGPALVKPTQTLTLTCTFSGFSLSTSGLCVSWIRQPPGKALEWLARIDWDDDKYYNTSLRTRLTISKDTSKNQVVLTMTNMDPVDTATYYCARATTFFYGMDVWGQGTTATVSS

SEQ ID NO: 622 - protein, 127 aa, Homo sapiens
QVQLVESGGGVVQPGRSLRLSCAASGFTFRRYGMYWVRQAPGKGLEWVAVISYDGTDKYYTDSVKGRFTISRDNSKNTLYLQMNSLRAEDTAVYYCAKKGGPYCGGGNCYAGYFDYWGQGILVTVSS

SEQ ID NO: 623 - protein, 127 aa, Homo sapiens
EVQVVESGGGLVQPGRSLRLSCAASGFTFEDYAMHWVRQAPGKGLEWVSGVSWNSGIIGYADSVKGRFTISRDNAKNSLYLQMNSLRAEDTALYYCAKLDVGGYDFVSGHYYAFDIWGQGTMVTVSS

SEQ ID NO: 624 - protein, 128 aa, Homo sapiens
QVQLVQSGSELKKPGASVKVSCKASGYTFSDYAMNWVRQAPGQGLEWMGWINTNTGNPTYAQGFTGRFVFSLDTSVSTAYLQISSLKAEDTAVYYCARGLISLFRGAIFHYYYGMDVWGQGTTVTVSS

SEQ ID NO: 625 - protein, 117 aa, Homo sapiens; identical to SEQ ID NO: 286

SEQ ID NO: 626 - protein, 127 aa, Homo sapiens
QITLKESGPTLVKPTQTLTLTCTFSGFSLSTKRVGVGWIRQPPGKALEWLALIYWDDDQRYSPSLKSRLTITKDTSKNQVVLTMTNMDPVDTATYYCAHSGPPDLSPVLSQGWFDPWGQGTLVTVSS

SEQ ID NO: 627 - protein, 129 aa, Homo sapiens
QVQLVESGGGVVQPGRSLRLSCAASGFTFVTSGIHWVRQAPGKGLEWVAVISYDGSNKYYADSVKGRFTISRDNSKNTLYLQMNSLRAEDTAVYYCAKGGPNKEVLYFGELLDYGMDVWGQGTTVTVSS

SEQ ID NO: 628 - protein, 117 aa, Homo sapiens; identical to SEQ ID NO: 389

SEQ ID NO: 629 - protein, 123 aa, Homo sapiens; identical to SEQ ID NO: 325

SEQ ID NO: 630 - protein, 122 aa, Homo sapiens; identical to SEQ ID NO: 603

SEQ ID NO: 631 - protein, 127 aa, Homo sapiens; identical to SEQ ID NO: 552

SEQ ID NO: 632 - protein, 122 aa, Homo sapiens; identical to SEQ ID NO: 296

SEQ ID NO: 633 - protein, 127 aa, Homo sapiens; identical to SEQ ID NO: 288

SEQ ID NO: 634 - protein, 123 aa, Homo sapiens
EVQLVQSGPEVKKPGTSVKVSCKASGFTFMSSAVQWVRQARGQRLEWIGWIVIGSGNTNYAQKFQERVTITRDMSTSTAYMELSSLRSEDTAVYYCAAPYCSSISCNDGFDIWGQGTMVTVSS

SEQ ID NO: 635 - protein, 127 aa, Homo sapiens; identical to SEQ ID NO: 544

SEQ ID NO: 636 - protein, 130 aa, Homo sapiens
EVQLVESGGGLVQPGGSLRLSCAASGFTFSSYWMSWVRQAPGKGLEWVANIKQDGSEKYFVDSVKGRFTISRDNAKNSLYLQMNSLRAEDAAVYYCARLVTTVTTANGLYYYSYYYMDVWGKGTTVTVSS

SEQ ID NO: 637 - protein, 121 aa, Homo sapiens
EVQLVESGGGAVQPGRSLRLSCAASGFTFSTYAMYWVRQAPGKGLEWVAVISYDGSNRYYADSVKGRFTISRDNSKNTLYLQMNSLRPEDTAVYYCARDRSGNYRDAFDIWGQGTMVTVSS

SEQ ID NO: 638 - protein, 122 aa, Homo sapiens
HQHQVEQGPGGVEQSETLFLTCCVSGGFTISSCYKRGGIRQPPRKGEEWAVSSYYSSSTYYTPSLKSRVTISVDKSKNQFSLKMSSVTAADTAVYYCARVSSGYYFTPFDYWGQGTRGHRLF

SEQ ID NO: 639 - protein, 121 aa, Homo sapiens
EVQLVESGGGVVQPGRSLRLSCAASGFTFSIYAMHWVRQAPGKGLEWVAVISYDGSNQYYADSVRGRFTISRGNSKNTLYLQMNSLRPEDTAVYYCARARGGSYNDAFDIWGQGTMVTVSS

SEQ ID NO: 640 - protein, 135 aa, Homo sapiens
EVQLVESGGGVVQPGRSLRLSCAASGFTFSSYGMHWVRQAPGKGLEWVAVISYDGSNKYYADSVKGRFTISRDNSKNTLYLQMNSLRAEDTAVYYCAKDGQYYDFWSGYLGARTNPHYYYYMDVWGKGTMVTVSS

SEQ ID NO: 641 - protein, 124 aa, Homo sapiens
EVQLVQSGGGLVQPGRSLRLSCAASGFTFGEYAMHWVRQAPGKGLEWVSGISWNSGSIDYADSVKGRFTISRDNAKNSLYLQMNSLRAEDTALYYCAKDMGEAVAGTHYGMDVWGQGTMVTASS

SEQ ID NO: 642 - protein, 122 aa, Homo sapiens
QVQLVESGAEVKKPGSSVKVSCKASGGTLSSYAITWVRQAPGQGLEWVGGIIPIFGTANYAQKFQGRVTITADESTSTAYMELSSLRSEDTAVYYCARVGAYDSSGYSNDYWGQGTLVTVSS

SEQ ID NO: 643 - protein, 121 aa, Homo sapiens
EVQLVESGGGVVQPGGSLRLSCAASGFTFSSYAMHWVRQAPGKGLEWVAVISYDGSNKYYADSVKGRFTISRDNSKNTLYLQMNSLRAEDTAVYYCAREDYYDSSGSFDYWGQGTLVTVSS

SEQ ID NO: 644 - protein, 122 aa, Homo sapiens
QLQLVESGPGLVKPSETLSLTCTVSGGSISSYFWSWIRQPPGKGLEWIGYIYYSGSTNYNPSLKSRVTISVDTSKNQFSLKLSSVTAADTAVYYCARHSQGWLQQAVAFDIWGQGTMVTVSS

SEQ ID NO: 645 - protein, 127 aa, Homo sapiens
EVQLVESGGGLVQPGGSLRLSCAASGFTVTSTYMTWVRRAPGKGLEWVSIIYNDDTTYYADSVKDRVTVSRDDSKNTLYLQMNSLRAEDTAIYYCARGGYYYDPSGYYSRSFSFDYWGQGTLVTVSS

SEQ ID NO: 646 - protein, 119 aa, Homo sapiens
EVQLVQSGTEVKKPGASVKVSCKASGYTFPGYYIHWVRQAPGQGLEWMGWINPNSGVAKSAQKFQGRVTMTRDSSISTVYLDVTSDDTAVYYCARDLVWATVSGTMDVWGQGTTVTVSS

SEQ ID NO: 647 - protein, 129 aa, Homo sapiens
QVQLVQSGAEVKKPGASVKVSCKASGYTFTSYYMHWVRQAPGQGLEWMGIINSSGGSTSYAQKFQGRVTMTRDTSTSTVYMELSSLRSEDTAVYYCARPPRNYYDRSGYYQRAEYFQHWGQGTLVTVSS

SEQ ID NO: 648 - protein, 118 aa, Homo sapiens
EVQLVESGGGLVQPGGSLRLSCAASGFTVSSNYMSWVRQAPGKGLEWVSVIYSGGSTYYADSVKGRFTISRDNSKNTLYLQMNSLRAEDTAVYYCARVEWAAAGTFYWGQGTLVTVSS

SEQ ID NO: 649 - protein, 127 aa, Homo sapiens
QVQLVESGGGLVKPGGSLRLSCAASGFTFSSYSMNWVRQAPGKGLEWVSSISSSSSFIYYADSVKGRFTISRDNAKNSLYLQMNSLRAEDTAVYYCARWKSDYYDSSGYYPAAFDIWGQRDKWSPSS

SEQ ID NO: 650 - protein, 129 aa, Homo sapiens
QVQLVESGGGLVKPGGSLRLSCAASGFTFSSYSMNWVRQAPGKGLEWVSSISSSSSYIYYADSVKGRFTISRDDAKNSLFLQMNSLRAEDTAVYYCAGDQNLYCSGDSCYYHYYGMDVWGQGTVVTVSS

SEQ ID NO: 651 - protein, 133 aa, Homo sapiens
EVQLVESGGGVVQPGRSLRLSCAASGFTFSSYAMHWVRQAPGKGLEWVAVISYDGSNKYYADSVKGRFTISRDNTKNTLYLQMNSLRAEDTAVYYCARDSEYYDILTGYLAPTHYYYYYMDVWGKGTTVTVSS

SEQ ID NO: 652 - protein, 127 aa, Homo sapiens
EVQLVESGAEVKKPGASVKVSCKASGYTFTSYGISWVRQAPGQGLEWMGWISAYNGYTNSAQKLQGRVTMTTDTSTSTAYMELRSLRSDDTAVYYCARDLVDTAMVQTLDDYGMDVWGQGTMVTVSS

SEQ ID NO: 653 - protein, 122 aa, Homo sapiens
QVQLVQSGAEVKKPGESLKISCKGSGYRFTTYWIGWVRQMPGKGLEWMGIIYPGDSDTRYSPSFQGQVTISADKSISTAYLQWSSLTASDTAIYYCARYYYDSRGYTSIDFWGQGTLVTVSS

SEQ ID NO: 654 - protein, 129 aa, Homo sapiens
EVQLVESGPGLVKPSETLSLTCTVSGGSISSTSYYWGWIRQPPGKGLECIGSIYYSGSTYYNPSLKSRVTISVDTSKNQFSLKLSSVTAADTAVYYCARLNYDFWSGYYSYALYYMDVWGKGTMVTVSS

SEQ ID NO: 655 - protein, 124 aa, Homo sapiens
QLQLQESGPGLVKPSQTLSLTCTVSGGSISSGGYYWSWIRQLPGKGLEWIGYIYYSGSTYYNPSLKSRVTISVDTSKNQFSLNLSSVTAADTAVYYCARQQLDYYDSSGCFDYWGQGTLVTVSS

SEQ ID NO: 656 - protein, 112 aa, Homo sapiens
EVQLVESGPGLVKPSETLSLTCTVSGGSISSYYWSWIRQPPGKRLEWIGYIYYSGSTNYNPSLKSRVTISVDTSKNQFSLKLNSVTAADTAAYYCARGFDYWGQGTRVTVSS

SEQ ID NO: 657 - protein, 120 aa, Homo sapiens
EVQLVESGGGLVQPGGSLRLSCAASGFTFSSYDMHWVRQTTGKGLQWVSAIGTAGDTYYPGSVKGRFTISRENAKNSLYLQMNSLRAGDTAVYYCARGGDRYPVGYFDLWGRGTLVTVSS

SEQ ID NO: 658 - protein, 123 aa, Homo sapiens
VQLQQESGPGLVKPSETLSLTCTVSGGSISSSSYYWGWIRQPPGKGLEWIGSIYYSGSTYYNPSLKSRVTISVDTSKNQFSLKLSSVTAADTAVYYCARRSTSRWGYYYMDVWGKGTRVTVSS

SEQ ID NO: 659 - protein, 125 aa, Homo sapiens
EVQLVESGGGLVQPGGSLRLSCAASGFTFSSYSMNWVRQAPGKGLEWVSYISSSSSTIYYADSVKGRFTISRDNAKNSLYLQMNSLRAEDTAVYYCAREANSDFWSGYLGYFDYWGQGTLVTVSS

SEQ ID NO: 660 - protein, 118 aa, Homo sapiens
QVQLVETGGGLIQPGGSLRLSCAASGFTVSSNYMSWVRQAPGKGLEWVSVIYSGGSTFYADSVKGRFTISRDNSKNTLYLQMNSLRAEDTAVYYCARDLERAGGMDVWGQGTMVTVSS

SEQ ID NO: 661 - protein, 127 aa, Homo sapiens
EVQLLESGAEVKKPGESLKISCKGSGYSFTSYWIGWVRQMPGKGLEWMGIIYPGDSDTRYSPSFQGQVTISADKSISTAYLQWSSLKASDTAMYYCARHMRPSIAARPGYQYYMDVWGKGTRVTVSS

SEQ ID NO: 662 - protein, 115 aa, Homo sapiens
EVQLVETGGGLIQPGGSLRLSCAASGLTVSSNYMNWVRQAPGKGLEWVSVIYSGGSTYYADSVKGRFTISRDNSKNTLYLQMNSLRAEDTAVYYCAREAYGMDVWGQGTMVTVSS

SEQ ID NO: 663 - protein, 125 aa, Homo sapiens
EVQLLESGGGLVQPGGSLKLSCAASGFTFSSYAMSWVRQAPGKGLEWVSAISGSGSNTYYADSVKGRFTISRDNSKNTLYLQMNSLRAEDTAVYYCAKGLRGQQLVIPTEYFQHWGQGTLVTVSS

SEQ ID NO: 664 - protein, 126 aa, Homo sapiens
EVQLVESGAEVKKPGSSVKVSCKASGGTLSSYAISWVRQAPGQGLEWMGGIIPIFGTANYAQKFQGRVTITTDESTSTAYMELSSLRSEDTAVYYCARGPRGCSSTSCYGSYFDYWGQGTLVTVSS

SEQ ID NO: 665 - protein, 127 aa, Homo sapiens
EVQLVESGGGLVKPGGSLRLSCAASGFTFGSYSMSWVRQAPGKGLEWVSSISRSSSYIYNADSVRGRLTISRDNAKNSLYLQMNSLRVEDTAVYYCARDQPLPDILTGYYTGPLDYWGQGTLVTVSS

SEQ ID NO: 666 - protein, 118 aa, Homo sapiens
QVQLVETGGGLIQPGGSLRLSCAASGFTVSSNYMSWVRQAPGKGLEWVSVIYSGGSTYYADSVKGRFTISRDNSKNTLYLQMNSLRAEDTAVYYCARDLDTMGGMDVWGQGTRVTVSS

SEQ ID NO: 667 - protein, 122 aa, Homo sapiens
QVQLVQSGAEVKKPGSSVKVSCKASGGTFSSYAIIWVRQAPGQGLEWMGGIIPIFGTANYAQKFQGRVTITTDESTSTAYMELSSLRSEDTAVYYCARVRYYDSSGYYEDYWGQGTLVTVSS

SEQ ID NO: 668 - protein, 129 aa, Homo sapiens
QVQLLESGGGLVQPGGSLRLSCAASGFTFSSYAMSWVRQAPGKGLEWASAISGSGGSTYYADSVEGRFTISRDNSKNTLYLQMNSLRAEDTAVYYCAKDTGYCGDDCYIKLIRGGPDYWGQGTLVTVSS

SEQ ID NO: 669 - protein, 123 aa, Homo sapiens
QVQLVQSGAEVKKPGATVKISCKVSGYTFTDYYMHWVQQAPGKGLEWMGLVDPEDGETIYAEKFQGRVTITADTSTDTAYMELSSLRSEDTAVYYCASSDSSGFVGSRGFDYWGQGTRVTVSS

SEQ ID NO: 670 - protein, 120 aa, Homo sapiens
QVQLVESGAEVKKPGSSVKVSCKASGGTFSSYGINWVRQAPGQGLEWMGGIIPIFGTANYAQKFQGRVTITTDESTSTAYMELSSLRSEDTAVYYCASFGDDSGDEGVRWGQGTLVTVSS

SEQ ID NO: 671 - protein, 122 aa, Homo sapiens
EVQLVQSGAEVKKPGSSVKVSCKASGGTFSSYAISWVRQAPGQGLEWMGGIIPIFGTTNYAQKFQGRVTITTDESTSTAYMELSSLRSEDTAVYYCARVYSYDSSGYYLEYWGQGTRVTVSS

SEQ ID NO: 672 - protein, 123 aa, Homo sapiens
EVQLVESGGGLIQPGGSLRLSCAASGFTVSSNYMSWVRQAPGKGLEWVSVIYSGGSTYYADSVKGRFTISRDNSKNTLYLQMNSLRAEDTAVYYCASPLLLTPPDYYYYMDVWGKGTMVTVSS

SEQ ID NO: 673 - protein, 117 aa, Homo sapiens
EVQLVESGPGLVKPSETLSLTCTVSGGSISSYYWSWIRQPAGKGLEWIGRIYTSGSTNYNPSLKSRVTMSVDTSKNQFSLKLSSVTAADTAVYYCARWKYNDRFDYWGQGTRVTVSS

SEQ ID NO: 674 - protein, 127 aa, Homo sapiens
EVQLVESGAEVKKPGSSVKVSCKASGGTFSSYAISWVRQAPGQGLEWMGGIIPIFGTANYAQKFQGRVTITTDESTSTAYMELSSLRSEDTAVYYCARGPRYCSSTSCYAGVYFDYWGQGTRVTVSS

SEQ ID NO: 675 - protein, 127 aa, Homo sapiens
EVQLVQSGAEVKKPGESLRISCKGSGYSFTSYWISWVRQMPGKGLEWMGRIDPSDSYTNYSPSFQGHVTISADKSISTAYLQWSSLKASDTAMYYCARPNPAGGYDSSGWVDAFDIWGQGTRVTVSS

SEQ ID NO: 676 - protein, 123 aa, Homo sapiens
EVQLVESGAEVKKPGASVKVSCKVSGYTLPELSMHWVRQTPGKGLEWMGGFDPEDGETIYAQKFQGRVTMTEDTSTDTAYMELSSLRSEDTAVYYCATGPTIAAAATNWFDPGGQGTLVTVSS

SEQ ID NO: 677 - protein, 125 aa, Homo sapiens
EVQLVESGGGLVKPGGSLRLSCAASGFTFSNAWMSWVRQAPGKGLEWVGRIKSKTDGGTTDYAAPVKGRFTISRDDSKNTLYLQMNSLKTEDTAVYYCTTDRGDSYGYYYCMDVWGKGTRVTVSS

SEQ ID NO: 678 - protein, 124 aa, Homo sapiens
EVQLVESGGGVVQPGRSLRLSCAASGFTFSSYGMHWVRQAPGKGLEWVAVIWYDGSNKYYADSVKGRFTISRDNSKNTLYLQMDSLRAEDTAMYYCAKDKAPPCSSGWYYFDYWGQGTLVTVSS

SEQ ID NO: 679 - protein, 125 aa, Homo sapiens
EVQLVESGGGVVQPGRSLRLSCAASGFTFSSYTMHWVRQAPGKGLEWVAVISYDGSNKYYADSVKGRFTISRDNSKNTLYLQMNSLRAEDTAVYYCASLPVVPAAIGPLPAFDIWGQGTMVTVSS

SEQ ID NO: 680 - protein, 128 aa, Homo sapiens
EVQLVESGPGLVKPSQTLSLTCTVSGGSISSGDYYWSWIRQPPGKGLEWIGYIYYSGSTYYNPSLKSRVTISVDTSKNQFSLKLSSVTAADTAVYYCARGVEDPVVPAAIPWCWFDPWGQGTRVTVSS

SEQ ID NO: 681 - protein, 136 aa, Homo sapiens
EVQLVESGVEVKKPGASVKVSCKAFGYTFTGQDMHWVRQAPGQGLEWMGWINPSSAGTNYAQKFQGRVTMTRDTSISTAYMELSRLRSDDTSVYYCRKMLTIFGKVNQTMLLISGAKGQWSPSLQWGQGTMVTVSS

SEQ ID NO: 682 - protein, 122 aa, Homo sapiens
EVQLVESGAEVKKPGSSVKVSCKASGGTFSSYAISWVRQAPGQGLEWMGGIIPIFGTANYAQKFQGRATITTDESTSTAYMELSSLGSEDTAVYYCARTHSYDNSGQYFDYWGQGTMVTVSS

SEQ ID NO: 683 - protein, 127 aa, Homo sapiens
QVQLVQSGAEVKKPGESLRISCKGSGYSFTSHWISWVRQMPGKGLEWMGRIDPSDSYTNYSPSFQGHVTISADKSISTAYLQWSSLKASDTAMYYCARLKVITIFGVVRDDYGMDVWGQGTTVTVSS

SEQ ID NO: 684 - protein, 121 aa, Homo sapiens
QVQLVESGGGVVQPGRSLRLSCAASGFTFSSYAMHWVRQAPGKGLEWVAVISYDGSNKYYADSVKGRFTISRDNSKNTLYLQMNSLRAEDTAVYYCARSASGSYYGAFDYWGQGTLVTVSS

SEQ ID NO: 685 - protein, 121 aa, Homo sapiens
EVQLVESGAEVKKPGASVKVSCKVSGYTLPELSMHWVRQAPGKGLDWMGGFDPEDGETIYAQKFQGRVTMTEDTSTDTAYMELSSLRSEDTAVYYCATSPAVMSVGWVDPWGQGTLVTVSS

SEQ ID NO: 686 - protein, 123 aa, Homo sapiens
QVQLQQSGPGLVKPSETLPLTCTVSGGSISSSSYYWGWIRQPPGKGLEWIGSVFYSGSTYYNPSLKSRVTISVDTSKNQLSLKLSSVTAADTAVYYCARQVRQWLEDDAFDIWGQGTMVTVSS

SEQ ID NO: 687 - protein, 123 aa, Homo sapiens
QVQLVETGGGLIQPGGSLRLSCAASGFTVSSNYMSWVRQAPGKGLEWVSVIYTGGTTYYADSVKGRFTISRDNSKNTLYLQMNSLRAEDTAVYYCARAHVDTAMVESGAFDIWGQGTRVTVSS

SEQ ID NO: 688 - protein, 122 aa, Homo sapiens
QVQLQESGPGLVKPSGTLSLTCAVSGGSISSSNWWSWVRQPPGKGLEWIGEIYHSGSSNYNPSLKSRVTISVDKSKNQFSLKLNSVTAADTAVYYCAGRYCSGGRCGWFDPWGQGTLVTVSS

SEQ ID NO: 689 - protein, 131 aa, Homo sapiens
EVQLVESGGGLVKPGGSLRLSCSASGFTFSNYNMDWVRQAPGKGLEWVSSISSSSSYIYLADSVKGRFTISRDNAKNSLYLQMNSLRAEDTAVYYCARVQKDIVVVPVALADYYYYGMDVWGQGTTVTVSS

SEQ ID NO: 690 - protein, 126 aa, Homo sapiens
QVQLVQPGAEVKKPGASVKVSCKASGYTFTSYGISWVRQAPGQGLEWMGWISAYNGDTNYAQKLQGRVTMTTDTSTSTAYMELRSLKSDDTAVYYCARFDYGYPYSSWSVLSIDYWGQGTLVTVSS

SEQ ID NO: 691 - protein, 122 aa, Homo sapiens
EVQLVESGGGVVQPGRSLRLSCAASGFTFSSYAMHWVRQAPGKGLEWVAVISYDGSYKYYADSVKGRFTISRDNSKNTLYLQMNSLTAEDTAVYYCAREGSRQWLVIYFDYWGQGTLVTVSS

SEQ ID NO: 692 - protein, 131 aa, Homo sapiens
EVQLLESGAEVKKPGASVKISCKASGYTFTGYYMHWVRQAPGQGLEWMGWINPNSGGTNYAQKFQGRVTMTRDTSISTAYMELSRLRSDDTAVYYCARGDGDYYDSSGYYRPTLYNWLDPWGQGTRVTVSS

SEQ ID NO: 693 - protein, 120 aa, Homo sapiens
QVQLQESGPGLVKPSETLSLTCTASGGSISSSSYYWGWIRQPPGKGLEWIGSIYYSGSTYYNPSLKSRVTISVDTSKNQFSLKLSSVTAADTAVYYCARHPSGLYQLLNWGQGTLVTVSS

SEQ ID NO: 694 - protein, 128 aa, Homo sapiens
EVQLVESGGGLVQPGRSLRLSCAASGFTFDDYAMHWVRQAPGKGLEWVSGISWNSGSIGYADSVKGRFTISRDSAKNSLYLQMNSLRAEDTALYYCAKVATYYYDRSGYYYGGALDYWGQGTLVTVSS

SEQ ID NO: 695 - protein, 120 aa, Homo sapiens
EVQLVESGPGLVKPSETLSLTCTVSGGSISSYYWSWIRQPPGKGLEWIGYIYYSGSTNYNPSLKSRVTISVDTSKNQFSLKLSSVTAADTAVYYCARGPAATYYYYMDVWGKGTRVTVSS

SEQ ID NO: 696 - protein, 119 aa, Homo sapiens
EVQLVESGGGLVQPGGSLRLSCAASGFTFSSYAMSWVRQAPGKGLEWVSTISGSGGNTYYADSVKGRFTISRDNSKNTLYLQMNSLRAEDTAVYYCAKEIAVAGCFDYWGQGTLVTVSS

SEQ ID NO: 697 - protein, 129 aa, Homo sapiens
EVQLVESGGGVVQPGRSLRLSCAASGFTFSSYGMHWVRQAPGKGLEWVAVIWYDGSNKYYADSVKGRFTISRDNSKNTLYLQMNSLRAEDTAVYYCARVGSVKSTAGYDFWSGDPFDYWGQGTLVTVSS

SEQ ID NO: 698 - protein, 123 aa, Homo sapiens
QVQLVQSGAEVKKPGASVKVSCKVSGYTLTELSMHWVRQAPGKGLEWMGGFDPEDGETIYAQKFQGRVTMTEDTSTDTAYMELSSLRSEDTAVYYCATAYSVDTAMVRGVGYWGQGTLVTVSS

SEQ ID NO: 699 - protein, 125 aa, Homo sapiens
QVQLVESRAEVKKPGSSVKVSCKASGGTFSSYAISWVRQAPGQGLEWMGRIIPILGITNYAQKFQGRVTITADKSTSTAYMELSSLRSEDTAVYYCARDAPDYYDSSGPTYFDYWGQGTLVTVSS

SEQ ID NO: 700 - protein, 123 aa, Homo sapiens
QVQLVESGGGLVQPGRSLRLSCAASGFTFDDYAMHWVRQAPGKGLEWVSGISWNSGSIGYADSVKGRFTISRDNAKNSLYLQMNSLRAEDTALYYCAKAEPEVGGYDYYMDVWGKGTMVTVSS

SEQ ID NO: 701 - protein, 120 aa, Homo sapiens
EVQLVESGPGLVKPSETLSLTCTVSGGSISSYYWSWIRQPPGKGLEWIGYIYYSGSTNYNPSLKSRVTISVDTSKNQFSLRLSSVTAADTAVYYCARGPAATYYYYMDVWGKGTMVTVSS

SEQ ID NO: 702 - protein, 127 aa, Homo sapiens
EVQLVESGGGLVQPGRSLRLSCAASGFTFDDYAMHWVRQAPGKGLEWVSGISWNSGSIGYADSVKGRFTISRDNAKNSLYLQMNSLRAEDTALYYCAKMGPDPAHDYGRKNDAFDIWGQGTMVTVSS

SEQ ID NO: 703 - protein, 123 aa, Homo sapiens
EVQLVESRAEMKKPGESLKISCKGSGYTFTNHWIAWVRQMPGKGLEWMGIIYPGDSDTRYSPSFEGQVTISADKSISTAYLQWSSLKASDTAMYYCARRGYTYGADFYGLDVWGQGTRVTVSS

SEQ ID NO: 704 - protein, 119 aa, Homo sapiens
QMQLVQSGTEVKKPGESLKISCKGSGYGFITYWIGWVRQMPGKGLEWMGIIYPGDSETRYSPSFQGQVTISADKSINTAYLQWSSLKASDTAIYYCAGGSGISTPMDVWGQGTTVTVSS

SEQ ID NO: 705 - protein, 124 aa, Homo sapiens
QVQLQESGPGLVKPSETLSLTCTVSGYSISSGYYWGWIRQPPGKGLEWIGSIYHSGSTYYNPSLKSRVTISVDTSKNQFSLKLSSVTAADTAVYYCARTPLSLRLRYNWYFDLWGRGTLVTVSS

SEQ ID NO: 706 - protein, 112 aa, Homo sapiens
QVQLQESGPGLVKPSETLSLTCNVSGGSISSYYWSWIRQPPGKGLEWIGYIYYSGSTNYNPSLKSRVTISVDTSKNQFSLKLSSVTAADTAVYYCARGFDYWGQGTLVTVSS

SEQ ID NO: 707 - protein, 118 aa, Homo sapiens
QVQLQESGPGLVKPSQTLSLTCTVSGGSISSGGYYWSWIRQHPGKGLEWIGYIYYSGSTYYNPSLKSRVTISVDTSKNQFSLKLSSVTAADTAVYYCARETTGHFDYWGQGTLVTVSS

SEQ ID NO: 708 - protein, 120 aa, Homo sapiens
QVQLVESGGGVVQPGRSLRLSCAASGFNLSNYAMHWVRQASGKGLEWVSLISYDGSVKYYTDSVKGRFTVSGDNSKNTLFLQMNSLRPDDSALYYCVRGGVSGPNSFDMWGQGTTVTVSS

SEQ ID NO: 709 - protein, 122 aa, Homo sapiens
QVQLVQSGSELKKPGASVKLSCQASGYSFTNHAMNWVRQAPGQGLEWMGWINTNTGNPTYAQGFTGRFVFSLDTSVSTTYLHISSLKAEDTAVYYCARASARPGVATNLDFWGQGTLVVVSS

SEQ ID NO: 710 - protein, 126 aa, Homo sapiens
EVQLVESGGGLVQPGGSLRLSCAASGFTFSSYWMSWVRQAPGKGLEWVANIKQDGSEKYYVDSVKGRFTISRDNAKNSLYLQMNSLRAEDTAVYYCARDFNSYQLLWYYYYGMDVWGQGTTVTVSS

SEQ ID NO: 711 - protein, 125 aa, Homo sapiens
EVQLVQSGAEVKKPGESLKISCKGSGYSFTSYWIGWVRQMPGKGLEWMGIIYPGDSDTRYSPSFQGQVTISADKSISTAYLQWSSLKASDTAMYYCARQSSFYSSGWYSYGMDVWGQGTTVTVSS

SEQ ID NO: 712 - protein, 124 aa, Homo sapiens
QVQLVQSGAEVKKPGASVKVSCKASGYTFTGYYMHWVRQAPGQGLEWMGWINPNSGGTNYAQKFQGRVTMTRDTSISTAYMELSRLRSDDTAVYYCARVDYGSGSYGWGWFDPWGQGTLVTVSS

SEQ ID NO: 713 - protein, 122 aa, Homo sapiens
QVQLVQSGAEVKKPGASVKVSCKVSGYTLTELSMHWVRQAPGKGLEWMGGFDPEDGETIYAQKFQGRVTMTEDTSTDTAYMELSSLRSEDTAVYYCATTSPIVGAITWFDPWGQGTLVTVSS

SEQ ID NO: 714 - protein, 127 aa, Homo sapiens
QVQLVQSGAEVKKPGASVKVSCKASGYTFTGYYMHWVRQAPGQGLEWMGWINPNSGGTNYAQKFQGRVTMTRDTSISTAYMELSRLRSDDTAVYYCAREYYYDSSVYPYYYYAMDVWGQGTTVTVSS

SEQ ID NO: 715 - protein, 119 aa, Homo sapiens
QVQLVESGGGVVQPGRSLRLSCAASGFTFSSYAMHWVRQAPGKGLEWVAVISYDGSNKYYADSVKGRFTISRDNSKNTLYLQMNSLRAEDTAVYYCARVRGSYYLFDYWGQGTLVTVSS

SEQ ID NO: 716 - protein, 127 aa, Homo sapiens
EVQLVESGGGLVKPGGSLRLSCAASGFTFSNAWMSWVRQAPGKGLEWVGRIKSKTDGGTTDYAAPVKGRFTISRDDSKNTLYLQMNSLKTEDTAVYYCTTDRVYDYIWGSYRYLDYWGQGTLVTVSS

SEQ ID NO: 717 - protein, 128 aa, Homo sapiens
EVQLVESGGGLVKPGGSLRLSCAASGFTFSSYSMNWVRQAPGKGLEWVSSISSSSSYIYYADSVKGRFTISRDNAKNSLYLQMNSLRAEDTAVYYCARDRESYDILTGYSMEGCFDYWGQGTLVTVSS

SEQ ID NO: 718 - protein, 126 aa, Homo sapiens
QVQLVQSGAEVKKPGASVKVSCKASGYTFTSYAMHWVRQAPGQRLEWMGWINAGNGNTKYSQKFQGRVTITRDTSASTAYMELSSLRSEDTAVYYCARVWGYCSGGSCYVDAFDIWGQGTMVTVSS

SEQ ID NO: 719 - protein, 122 aa, Homo sapiens
QVQLVQSGAEVKKPGASVKVSCKVSGYTLTELSMHWVRQAPGKGLEWMGGFDPEDGETIYAQKFQGRVTMTEDTSTDTAYMELSSLRSEDTAVYYCATAPPYSPPSSWFDPWGQGTLVTVSS

SEQ ID NO: 720 - protein, 130 aa, Homo sapiens
QVQLQESGPGLVKPSQTLSLTCTVSGGSISSGDYYWSWIRQPPGKGLEWIGYIYYSGSTYYNPSLKSRVTISVDTSKNQFSLKLSSVTAADTAVYYCARDHHYDFWSGYSSYYYYGMDVWGQGTTVTVSS

SEQ ID NO: 721 - protein, 134 aa, Homo sapiens
QVQLVESGGGVVQPGRSLRLSCAASGFTFSSYAMHWVRQAPGKGLEWVAVISYDGSNKYYADSVKGRFTISRDNSKNTLYLQMNSLRAEDTAVYYCARDEAYYDILTGYINAPKNYYYYGMDVWGQGTTVTVSS

SEQ ID NO: 722 - protein, 121 aa, Homo sapiens
QVQLVESGGGVVQPGRSLRLSCAASGFTFSSYAMHWVRQAPGKGLEWVALISYDGSNKYYADSVKGRFTISRDNSKNTLYLQMNSLRAEDTAVYYCARSFGGSYYYGMDVWGQGTTVTVSS

SEQ ID NO: 723 - protein, 122 aa, Homo sapiens; identical to SEQ ID NO: 709

SEQ ID NO: 724 - protein, 118 aa, Homo sapiens
EVQLVESGGGLIQPGGSLRLSCAASGVIVSSNYMSWVRQAPGKGLEWVSVIYSGGSTYYADSVKGRFTISRDNSKNTLYLQMNSLRAEDTAVYYCARDLDVSGGMDVWGQGTTVTVSS

SEQ ID NO: 725 - protein, 122 aa, Homo sapiens; identical to SEQ ID NO: 719

SEQ ID NO: 726 - protein, 122 aa, Homo sapiens
QVQLVQSGAEVKKPGASVKVSCKASGYTFTGYYMHWVRQAPGQGLEWMGWINPNSDVTNYAQKFQGRVTMTRDTSISTAYMELSRLRSDDTAVYYCAREARDYYGSGSLDYWGQGTLVTVSS

SEQ ID NO: 727 - protein, 123 aa, Homo sapiens
QVQLVQSGAEVKKPGASVKVSCKASGYTFTSYDISWVRQAPGQGLEWMGWISAYNGNTNYAQKLQGRVTMTTDTSTSTAYMELRSLRSDDTAVYYCARDSVAGIYYYYGMDVWGQGTTVTVSS

SEQ ID NO: 728 - protein, 121 aa, Homo sapiens
QVQLVESGGGVVQPGRSLRLSCAASGFTFSSYAMHWVRQAPGKGLEWVAVISYDGSNKYYADSVKGRFTISRDNSKNTLYLQMNSLRAEDTAVYYCARSYGGSYYYGMDVWGQGTTVTVSS

SEQ ID NO: 729 - protein, 124 aa, Homo sapiens; identical to SEQ ID NO: 705

SEQ ID NO: 730 - protein, 125 aa, Homo sapiens
QVQLVQSGAEVKKPGASVKVSCKASGYTFTGYYMHWVRQAPGQGLEWMGWINPNSGGTNYVQKFQGRVTMTRDTSISTAYMELNRLRSDDTAVYFCARDLTTTAGTDYYYGMDVWGQGTTVTVSS

SEQ ID NO: 731 - protein, 128 aa, Homo sapiens
QVQLVQSGAEVKKPGASVKVSCKASGYTFTSYGISWVRQAPGQGLEWMGWISAYNGNTNYAQKLQGRVTMTTDTSTSTAYMELRSLRSDDTAVYYCARARVAYDYIWGSYRYKAFDYWGQGTLVTVSS

SEQ ID NO: 732 - protein, 121 aa, Homo sapiens
QVQLVESGGGVVQPGRSLRLSCAASGFTFSSYAMHWVRQAPGKGLEWVAVISYDGSNKYYADSVKGRFTISRDNSKNTLYLQMNSLRAEDTAVYYCARAQTAHYSSSFDYWGQGTLVTVSS

SEQ ID NO: 733 - protein, 120 aa, Homo sapiens
QVQLVESGGGVVQPGRSMRLSCAASGFNLSSYAMHWVRQASGKGLEWVSLISYDGSIKYYADSVKGRFTVSGDNSKNTLFLQMSSLRADDSALYYCVRGGVSGPNAFDIWGQGTTVTVSS

SEQ ID NO: 734 - protein, 121 aa, Homo sapiens
QVQLVESGGGVVQPGRSLRLSCAASGFTFSSYAMHWVRQAPGKGLEWVAVISYDGSNKYYADSVKGRFTISRDNSKNTLYLQMNSLRAEDTAVYYCARSISGSYLGAFDYWGQGTLVTVSS

SEQ ID NO: 735 - protein, 123 aa, Homo sapiens
QVQLVQSGAEVKKPGASVKVSCKASGYTFSSYGISWVRQDPGQGLEWMGWISAYNGNTNYAQKLQGRVTMTTDTSTSTAYMELRSLRSDDTAVYYCARVGLWWLGHPDAFDIWGQGTMVTVSS

SEQ ID NO: 736 - protein, 121 aa, Homo sapiens
QVQLVESGGGVVQPGRSLRLSCAASGFTFSSYAMHWVRQAPGKGLEWVAVISYDGSNKYYADSVKGRFTISRDNSKNTLYLQMNSLRAEDTAVYYCARTKGGSYFAPFDYWGQGTLVTVSS

SEQ ID NO: 737 - protein, 122 aa, Homo sapiens
QVQLVQSGAEVKKPGASVKVSCKASGYTFTSYGISWVRQAPGQGLEWMGWISAYNGNTNYAQKVQGRVTMTTDTSTSTAYMELRSLRSDDTAVYYCARDRGYAATFGVFDYWGQGTLVTVSS

SEQ ID NO: 738 - protein, 117 aa, Homo sapiens
QVQLVESGGGVVQPGRSLRLSCAASGFTFSSYAMHWVRQAPGKGLEWVAVISYDGSNKYYADSVKGRFTISRDNSKNTLYLQMNSLRAEDTAVYYCARVTVVHFDYWGQGTLVTVSS

SEQ ID NO: 739 - protein, 127 aa, Homo sapiens
QVQLVQSGAEVKKPGASVKVSCKASGYTFTSYYMHWVRQAPGQGLEWMGIINPSGGSTSYAQKFQGRVTMTRDTSTSTVYMELSSLRSEDTAVYYCARDLTSTSSSPYSYYYGMDVWGQGTTVTVSS

SEQ ID NO: 740 - protein, 129 aa, Homo sapiens
QVQLVQSGAEVKKPGASVKVSCKASGYTFTSYGISWVRQAPGQGLEWMGWISAYNGNTNYAQKLQGRVTMTTDTSTSTAYMELRSLRSDDTAVYYCARVTVEAIFGVVILPLKNWFDPWGQGTLVTVSS

SEQ ID NO: 741 - protein, 120 aa, Homo sapiens
QVQLVESGGGVVQPGRSLRLSCAASGFNLSNYAMHWVRQASGKGLEWVSLISYDGSIKYYTDSVKGRFTVSGDNSKNTLFLQMNSLRPDDSALYYCVRGGVSGPNSFDMWGQGTTVTVSS

SEQ ID NO: 742 - protein, 123 aa, Homo sapiens
QVQLVQSGAEVKKPGASVKVSCKASGYTFTSYGISWVRQAPGQGLEWMGWISAYSGNTNYAQKLQGRVTMTTDTSTSTAYMEVRSLRSDDTAVYYCARVGLWWLGHPDVFDIWGQGTMVTVSS

SEQ ID NO: 743 - protein, 125 aa, Homo sapiens
QVQLVQSGAEVKKPGSSVKVSCKASGGTFSSYTINWVRQAPGQGLEWMGRIIPILGIADYAQKFQGRVTITADKSTSTAYMELSSLRSEDTAVYYCARDLVEDTAMVTGAAAGTWGQGTLVTVSS

SEQ ID NO: 744 - protein, 124 aa, Homo sapiens
QVQLVQSGAEVKKPGASVKVTCKASGYTFTSYYLHWVRQAPGQGLEWMGIINPSGGTTSYAQKFQGRVTMTRDTSTSTVYMELSSLRSEDTAVYYCARAGRRYSSSDDGAFDIWGQGTMVTVSS

SEQ ID NO: 745 - protein, 124 aa, Homo sapiens
QVQLVESGGGVVQPGRSLRLSCAASGFTFSSYGMHWVRQAPGKGLEWVAVIWYDGSNKYYADSVKGRFTISRDNSKNTLYLQMNSLRAEDTAVYYCARDIMFGDDWLQKQPDYWGQGTLVTVSS

SEQ ID NO: 746 - protein, 121 aa, Homo sapiens; identical to SEQ ID NO: 734

SEQ ID NO: 747 - protein, 132 aa, Homo sapiens
QVQLVQSGAEVKKPGASVKVSCKASGYTFTSYGISWVRQAPGQGLEWMGWISAYNGNTNYAQKLQGRVTMTTDTSTSTAYMELRSLRSDDTAVYYCARLVPTWASYYDFWSGYPGGYGMDVWGQGTTVTVSS

SEQ ID NO: 748 - protein, 125 aa, Homo sapiens
QLQLQESGPGLVKPSETLSLTCTVSGGSISSSSYYWGWIRQPPGKGLEWIGSIYYSGSTYYNPSLKSRVTISVDTSKNQFSLKLSSVTAADTAVYYCATHIVVVTATPNWYFDLWGRGTLVTVSS

SEQ ID NO: 749 - protein, 121 aa, Homo sapiens
EVQLVESGGGVVQPGRSLRLSCAASAFTFSSYDMHWVRQAPGKGLEWVAVISYDGSNKYYADSVKGRFTISRDNSKNTLYLQMNSLRAEDTAVYYCAKDGGKLWVYYFDYWGQGTLVTVSS

SEQ ID NO: 750 - protein, 122 aa, Homo sapiens
QVQLVQSGAEVKKPGASVKVSCKASGYTFTGYYMHWVRQAPGQGLEWMGWINPNSGGTNYTQMFQGRVTMTRDTSISTAYMEVSRLRSDDTAVYYCARDRSWAVVYYYMDVWGKGTTVTVSS

SEQ ID NO: 751 - protein, 138 aa, Homo sapiens
QVQLVQSGAEVKKPGASVKVSCKASGYTFTSYDINWVRQATGQGLEWMGWMNPNSGNTGYAQKFQGRVTMTRNTSISTAYMELSSLRSEDTAVYYCARATTDCSSTSCWSLDFWSGYYTGGREKIFDWGQGTLVTVSS

SEQ ID NO: 752 - protein, 118 aa, Homo sapiens
QVQLVQSGSELKKPGASVKVSCKASGYTFLRFAMNWLRQAPGQGLEWMGWIDTNTGTPTYAQGFTGRFVFSLDTSVSTAYLQISSLKAEDTAVYYCARSLRGANLVPWGQGTLVTVSS

SEQ ID NO: 753 - protein, 118 aa, Homo sapiens; identical to SEQ ID NO: 752

SEQ ID NO: 754 - protein, 127 aa, Homo sapiens
QVQLVESGGGLMQAGGSLRLSCAVSGRTFSTAAMGWFRQAPGKEREFVAAIRWSGGSAYYADSVKGRFTISRDKAKNTVYLQMNSLKYEDTAVYYCARTENVRSLLSDYATWPYDYWGQGTQVTVSS

SEQ ID NO: 755 - protein, 127 aa, Homo sapiens
QVQLVESGGGLMQAGGSLRLSCAVSGRTFSTAAMGWFRQAPGKEREFVAAIRWSGGSAYYADSVKGRFTISRDKAKNTVYLQMNSLKYEDTAVYYCAQTHYVSYLLSDYATWPYDYWGQGTQVTVSS

SEQ ID NO: 756 - protein, 126 aa, Homo sapiens
QVQLVQSGAEVKKPGASVKVSCKASGYTFTGYYMHWVRQAPGQGLEWMGRINPNSGGTNYAQKFQGRVTMTRDTSISTAYMELSRLRSDDTAVYYCARVPYCSSTSCHRDWYFDLWGRGTLVTVSS

SEQ ID NO: 757 - protein, 126 aa, Homo sapiens
QVQLVESGGGVVQPGRSLRLSCAASGFTFSSYGMHWVRQAPGKGLEWVAVIWYDGRNKYYVDSVKGRFTISRDNSKNTLYLQISSLRAEDTAVYYCARAARRPVVTDTMAYYMDVWGKGTTVTVSS

SEQ ID NO: 758 - protein, 123 aa, Homo sapiens
QMQLVQSGPEVKKPGTSVKVSCKASGFTFTSSAVQWVRQARGQRLEWIGWIVVGSGNTNYAQKFQERVTITRDMSTSTAYMELSSLRSEDTAVYYCAAPHCSSTICYDGFDIWGQGTMVTVSS

SEQ ID NO: 759 - protein, 120 aa, Homo sapiens
QVQLVESGGGVVQPGRSLRLSCAATGFTFRRYGMHWVRQAPGKGLEWVAGILFDGSNKYYVDSVKGRFTISRDSSRNTLYLQLNSLRREDTAVYYCAKGGDYEWELLESWGQGTLVTVSS

SEQ ID NO: 760 - protein, 117 aa, Homo sapiens
EVQLVESGGGLVQPGGSLRLSCAASGFTVSSNYMSWVRQAPGKGLEWVSVIYSGGSTFYADSVKGRFTISRDNSKNTLYLQMNSLRAEDTAVYYCARDFGDFFFDYWGQGTLVTVSS

SEQ ID NO: 761 - protein, 117 aa, Homo sapiens
EVQLVESGGGLVQPGGSLRLSCAASGFIVSSNYMSWVRQAPGKGLEWVSVIYSGGSTFYADSVKGRFTISRDNSKNTLYLQMNSLRAEDTAVYYCARDYGDYFFDYWGQGTLVTVSS

SEQ ID NO: 762 - protein, 123 aa, Homo sapiens
QMQLVQSGPEVKKPGTSVKVSCKASGFTFSSSAVQWVRQARGQRLEWIGWIVVGSGNTNYAQKFQGRVTITRDMSTRTAYMELSSLRSEDTAMYYCAAPYCSSTRCYDAFDIWGQGTMVTVSS

SEQ ID NO: 763 - protein, 125 aa, Homo sapiens
EVQLVESGGGLVQPGRSLRLSCAASGFTFDDYAMHWVRQAPGKGLEWVSGISWNSGSIGYADSVKGRFTISRDNAKNSLYLQMNSLRAEDTGLYYCAKDINYDSGGYHKNYFDYWGQGTLVTVSS

SEQ ID NO: 764 - protein, 125 aa, Lama pacos
QVQLVESGGGSVQAGGSLRLSCAASGSISSITYLGWFRQAPGKEREGVAALITDSGRTYYADSVKGRFTVSLDNAKNTVYLQMNSLKPEDTALYYCAAAEWGYEWPLYYASSWYWGQGTQVTVSS

SEQ ID NO: 765 - protein, 125 aa, Lama pacos; identical to SEQ ID NO: 764

SEQ ID NO: 766 - protein, 125 aa, Lama pacos; identical to SEQ ID NO: 764

SEQ ID NO: 767 - protein, 125 aa, Lama pacos; identical to SEQ ID NO: 764

SEQ ID NO: 768 - protein, 125 aa, Lama pacos; identical to SEQ ID NO: 764

SEQ ID NO: 769 - protein, 125 aa, Lama pacos; identical to SEQ ID NO: 764

SEQ ID NO: 770 - protein, 125 aa, Lama pacos; identical to SEQ ID NO: 764

SEQ ID NO: 771 - protein, 125 aa, Lama pacos; identical to SEQ ID NO: 764

SEQ ID NO: 772 - protein, 125 aa, Lama pacos; identical to SEQ ID NO: 764

SEQ ID NO: 773 - protein, 125 aa, Lama pacos; identical to SEQ ID NO: 764

SEQ ID NO: 774 - protein, 125 aa, Homo sapiens; identical to SEQ ID NO: 764

SEQ ID NO: 775 - protein, 125 aa, Homo sapiens; identical to SEQ ID NO: 764

SEQ ID NO: 776 - protein, 125 aa, Homo sapiens; identical to SEQ ID NO: 764

SEQ ID NO: 777 - protein, 125 aa, Homo sapiens; identical to SEQ ID NO: 764

SEQ ID NO: 778 - protein, 125 aa, Homo sapiens; identical to SEQ ID NO: 764

SEQ ID NO: 779 - protein, 125 aa, Homo sapiens; identical to SEQ ID NO: 764

SEQ ID NO: 780 - protein, 125 aa, Homo sapiens; identical to SEQ ID NO: 764

SEQ ID NO: 781 - protein, 125 aa, Homo sapiens; identical to SEQ ID NO: 764

SEQ ID NO: 782 - protein, 125 aa, Homo sapiens; identical to SEQ ID NO: 764

SEQ ID NO: 783 - protein, 125 aa, Homo sapiens; identical to SEQ ID NO: 764

SEQ ID NO: 784 - protein, 125 aa, Homo sapiens; identical to SEQ ID NO: 764

SEQ ID NO: 785 - protein, 125 aa, Homo sapiens; identical to SEQ ID NO: 764

SEQ ID NO: 786 - protein, 125 aa, Homo sapiens; identical to SEQ ID NO: 764

SEQ ID NO: 787 - protein, 116 aa, Homo sapiens
EVQLVESGGGVVQPGRSLRLSCAASGFTFSSYGMHWVRQAPGKGLEWVAVIWYDGSNKYYADSVKGRFTISRDNSKNTLYLQMNSLRAEDTAVYYCARVGSGRVYWGQGTLVTVSS

SEQ ID NO: 788 - protein, 130 aa, Homo sapiens
QVQLVESGPGLVRPSGTLSVTCAVSGDSISSDYWCTWVRQSPGKGLEWIGKISHSGSLNYNPSLKSRVTMSVDKSKNHFSLKLASVTAADTAVYYCARVRIGASHHNFWSGYYTDAFDIWGQGTTVTVSS

SEQ ID NO: 789 - protein, 128 aa, Homo sapiens
QVQLVQSGAEVKKPGESLKISCKASGYSFTNYWVGWVRQMPAKGLEWMGIIWPDDSDTRYRPSFQGQVTISVDKSISTAYLHWNSLKASDNGMYFCARAPLASCSGGRCPTYNRFDLWGQGTLVTVSS

SEQ ID NO: 790 - protein, 125 aa, Homo sapiens
QVQLVQSGAEVKKPGSSMKVSCKASGVNFRSYSFSWVRQAPGQGLEWMGGVIPYFPTANYADKFRDRVTITADESTGTVYLDMSSLRSEDTAVYFCASEYFDGRSYHSFCGLDVWGQGTTVTVSS

SEQ ID NO: 791 - protein, 123 aa, Homo sapiens
QVQLVESGGGLVQPGGSLRLSCAASGFTFSNYAMTWVRQAPGKGLKWVSGINPSGDATFYTDSVKGQFTISRDNSKNILYLQMNRLRADDTAIYYCAKGLSFYGSGSDAFDVWGQGTTVTVSS

SEQ ID NO: 792 - protein, 124 aa, Homo sapiens
QVQLVQSGAEVKKPGASVKVSCKASGYTFTDYYVHWVRQVPGQGLEWMGWISPDSGDTIRAQNFQGRVTMTRDTSMNTAYMEVNRLRTDDTAIYYCARDLISVIRGLGGGMDVWGQGTTVTVSS

SEQ ID NO: 793 - protein, 126 aa, Homo sapiens
QVQLVQSGAEVKKPGASVKVSCKTSGYTFTGHYIHWVRQAPGQGLEWMGWINPASGDTNYAQKFQGRVTKTRDTSITTAYMELNRLRSDDTAVYYCARGGPLPWSDLDIVGTFDYWGQGTLVTVSS

SEQ ID NO: 794 - protein, 125 aa, Homo sapiens
EVQLVESGGGVVQPGKSLRLSCVPSGFSFGTYGMHWVRQAPGKGPEWLAVMWYDGITQYYADSVKGRFTISRDNSKETLYLQMNSLTADDTGIYYCVKDQSSGDRLLYLGYFDLWGPGALVTVSS

SEQ ID NO: 795 - protein, 125 aa, Homo sapiens
QVQLVQSGGGVVQPGKSLRLSCVASGFSFGTYGMHWVRQAPGKGPEWLAVMWYDGITQYYADSVKGRFTISRDNSKETLYLQMNSLTADDTGVYYCVKDQSSGDRLLYLGYFDLWGPGTLVTVSS

SEQ ID NO: 796 - protein, 127 aa, Homo sapiens
QVQLQESGPGLVKPSGTLSLTCAVSGASVSSDHWWSWVRQSPGKGLEWIGEVYHSGSTNYNPSLKSRVTISLDQSNNQFSLKLTSVTAADTAIYYCATMWGGLCTASNCYGNPMDVWGQGTTVTVSS

SEQ ID NO: 797 - protein, 129 aa, Homo sapiens
QVQLVQSGAEVRKPGSSVKLSCKASGGTFSTHAISWVRQAPGQRPEWMGGIMPIFGESKDTQKFQGRVTFTADESTTTAYMELRSLRSDDTAIYYCVRDSDPYTATVTSNHYWYAMDVWGQGTTVTVSS

SEQ ID NO: 798 - protein, 128 aa, Homo sapiens
QVQLQQWGAGVLKPSETLSLTCAVYGGSFRGFFWSWIRQPPGKGLEWIGQITHSGSTNYNSSLKSRLTISVDTSKNQFSLNLSSVTAADTAIYYCARGQGGYDLRRVGYGLTSWFDPWGQGILVTVSS

SEQ ID NO: 799 - protein, 127 aa, Homo sapiens
QVQLVQSGAEVKKPGASVKVSCKASGYTFTSYYIHWVRQAPGQGLEWLGVIHPSGGSTTFAQKFQGRVTMTRDTSTSTVYMELGSLRSDDTAVYYCARVLAGSSHEWQLTHDAFDIWGQGTTVTVSS

SEQ ID NO: 800 - protein, 124 aa, Homo sapiens
EVQLVESGAEVKKPGASVILSCKASGYTVTNYYIHWVRQAPGQGLEWMGWIDPDSGVTNFAEKFQGRVTMTRDTSISTAYMELRWLESDDTAVYYCAKDLITVIRGLGGGMDVWGQGTTVTVSS

SEQ ID NO: 801 - protein, 122 aa, Homo sapiens
EVQLLESGAEVKKPGSSVKVSCKASGGTFSSDAISWVRQAPGQGLEWMGGIIPIFGTTNYAQKFQGRVTITADESTNTAYMELSSLRSEDTAVYYCARDGPYDSGGYHLNHWGQGTLVTVSS

SEQ ID NO: 802 - protein, 120 aa, Homo sapiens
EVQLLESGGGVVNPGGSMRLSCAGSGFTFSDHYMGWIRQAPGKGLEVISYISSSGSFIRDADSVKGRFTISRDNAKNSVYLQMNSLRAEDTAVYYCARMGPYGSGTFDYWGQGTLVTVSS

SEQ ID NO: 803 - protein, 124 aa, Homo sapiens
EVQLVESGAEVRKPGSSVKVSCKATGGTFSSYGITWVRQAPGQGLEWMGRIIPTLGRTNYAQKFQGRVTITADKSTSTAHMELSSLRSEDTAVYYCARDLSTLQPDAIVNFDYWGQGTLVTVSS

SEQ ID NO: 804 - protein, 123 aa, Homo sapiens
QVQLVQSGAEVKKPGSSVKVSCKTSGGSFTSYVLSWVRQAPGQGLEWMGRIVPNLGVANYAQKFQDRVTITADKSTTTAYLELRSLRSEDTAVYYCARDLYYDNGGYNYLDYWGPGTLVTVSS

SEQ ID NO: 805 - protein, 127 aa, Homo sapiens
QVQLVESGGGLVQPGGSLRLSCAASGFTFSNYNMVWVRQAPGKGLEWISYISSSSSTIYYADSVKGRFIISRDNAKNSLHLQMNSLRDEDTAVYYCVRDYCNSVSCYTYYYIGMDVWGQGTTVTVSS

SEQ ID NO: 806 - protein, 123 aa, Homo sapiens
EVQLVQSGAEVKKPGASVKVSCKASGYSSTNYGFSWVRQAPGQGLEWMGWISVHSGNANFAQKFQGRITMTTDTSTTTAYMELRNLRSDDTATYYCATSASSYSRYYFGLDVWGQGTTVTVSS

SEQ ID NO: 807 - protein, 126 aa, Homo sapiens
EVQLLESGPGLVKPSQTLSLTCTVSNGFISSGEYYWSWIRQSPGKGLEWIGYISHSGSTYYNRSLKSRVTISLDTSRNQFSLNLSSVTAADTAVYYCARDLAKWSYGYYYSGMDVWGQGTTVTVSS

SEQ ID NO: 808 - protein, 124 aa, Homo sapiens
QVQLVQSGAEVKKPGSSVKVSCKISGGTFKNSAFSWARQVPGQGFQWMGGIIPMFGVPHSVQMFQGRVTLTADESTSAVYMELSGLTSDDTAVYYCAREEYSGTVHNFFGMDVWGQGTTVTVSS

SEQ ID NO: 809 - protein, 125 aa, Homo sapiens
EVQLVESGGGLVQPGRSLRLSCAASGFTFDDYAMHWVRQVPGRGLEWVSGISWNSGTINYADSVMGRFTISRDNAKNSLYLQMNSLRAEDTALYYCAKDGRYCSGISCRTGMDVWGQGTTVTVSS

SEQ ID NO: 810 - protein, 121 aa, Homo sapiens
EVQLVESGGGLVQPGESLRLSCAASGFNFSPYGMNWVRQAPGKGLEWIAYIISGSGTIYYADSVKGRFTISRDNAQSSLYLQMNSLRAEDTAVYYCARGLLDYLHDAFDIWGQGTMVTVSS

SEQ ID NO: 811 - protein, 123 aa, Homo sapiens
EVQLQESGPGLVKPSETLSLTCAVSGGSVSSDTDYWGWIRQPPGKGLEWIGSIHDSERTYYDPSLKSRVTISVDTSKNQFSLRLSSVTAADTALYFCASRHLDLLPIGSFDVWGRGTMVTVSS

SEQ ID NO: 812 - protein, 125 aa, Homo sapiens
QVQLLESGGGLVQPGRSLRLSCTASGFRFGDYTMTWFRQAPGKGLEWVGFIRSIAYGGTTEHAASVEGRFIISRDDSKSIAYLQMNSLKAEDTGVYFCTRGSGMFYGSSSGMDVWGQGTTVTVSS

SEQ ID NO: 813 - protein, 121 aa, Homo sapiens
EVQLLESGAEVKKPGSSVKVSCKTSGGTFNSYTISWVRQAPGQGLEWMGGIIPILDTPHYAQKFRGRVTITADKSTSTAFMDLSSLTSEDTAVYYCAIRRDYSDYRDFDYWGQGTLVTVSS

SEQ ID NO: 814 - protein, 121 aa, Homo sapiens
EVQLVESGPGLVKPSETLSLACTVSGGSISNYYWNWVRQPPGKGLEWIGNIYYSGSTTFNPSLKSRVTISVDTSRNQFSLKLSSVTAADTAVYYCARQSSSWYNPYYFDQWGQGTLVTVSS

SEQ ID NO: 815 - protein, 121 aa, Homo sapiens
QVQLVQSGGGLVQPGESLRLSCAASGFNFSPYGMNWVRQAPGKGLEWIAYIISGSGTIYYADSVKGRFTISRDNAQSSLYLQMNSLRAEDTAVYYCARGLLDYLHDAFDIWGQGTMVTVSS

SEQ ID NO: 816 - protein, 126 aa, Homo sapiens
EVQLVESGAEVKNPGSSVKISCKSSGGTLGDYAISWVRQAPGLGLEWLGGIMPLHGTTGYSQRFRPRLTITADESARTAYMELTALSSEDSAIYYCARDPSILNTGNHHWYDLDLWGQGTEVTVSS

SEQ ID NO: 817 - protein, 121 aa, Homo sapiens
EVQLLESGGGVVQPGRSLRLSCAASGFTFNSYALFWVRQAPGKGLEWVAVVSYDGNNKYYADSVKGRFTISRDNSKNTLYLQMNSLKTEDTSVYYCARPRSGSYRQAIDYWGLGTLVTVSS

SEQ ID NO: 818 - protein, 123 aa, Homo sapiens
QVQLVQSGGGLVQPGGSLRLSCAASGFIFSGHWMSWVRQAPGKGLEWVANIKQDGREKHYVDSVKGRFTISRDNAKNSVSLQMNSLRAEDTAVYYCVRQNVAIQYYYYAMDVWGQGTTVTVSS

SEQ ID NO: 819 - protein, 121 aa, Homo sapiens
EVQLVESGGGVVQPGRSLRLSCAASGFTFSGYPMHWVRQAPGKGLEWVALISFDGDSKYYTDSVKARFAISRDNSKNTLFLQMNSLRVADTALYYCARAKGGSYSNAFDYWGQGTLVTVSS

SEQ ID NO: 820 - protein, 126 aa, Homo sapiens
QVQLVESGAEVKKPGSSVKVSCKASGGTLSDYAISWVRQAPGQGLEWMGGIMPIFGSPGYAEIFQGRVTITADESKSTVYMELTSLRSEDTAVYYCARDPSILDTGNHHWYDLDIWGQGTMVTVSS

SEQ ID NO: 821 - protein, 124 aa, Homo sapiens
QVQLVQSGAEVKKPGSSVKVSCKTSGATYKNSAFSWARQAPGQGFQWMGGIIPLFGVPHYVQMFQGRVTITADESTSAVYMELSGLTSDDTAVYYCAREEYSGTVHNFFGMDVWGQGTTVTVSS

SEQ ID NO: 822 - protein, 122 aa, Homo sapiens
EVQLVESGGGLVQPGGSLRLSCSASEFTLRSHAMHWVRQAPGKGLEYVSGISTDGSGRFYADSVKGRFTISRDNSKNKLFLQMSSLRPEDTAVYYCVRDWGSSTHYDVFDLWGQGTMVTVSS

SEQ ID NO: 823 - protein, 126 aa, Homo sapiens
QVQLVQSGAEVKKPGSSVKVSCKASGGTLADYAISWVRQAPGQGLEWMGGIKPLHGAAGYSQHFRGRLSITADESASTAYMELTGLRSEDTAMYYCARDPSILNTGNHHWYDLDLWGQGTMVTVSS

SEQ ID NO: 824 - protein, 126 aa, Homo sapiens
QVQLVQSGAELKKPGSSVKVSCKASGGTFYNSAFSWLRHAPGQGPEWMGGITPSLGRVGYSERFLARLTITADESTSTVYMELTSLASEDTAVYYCARDASIVGTGNHLWYGLDFWGHGTTVTVSS

SEQ ID NO: 825 - protein, 123 aa, Homo sapiens
EVQLVESGGHVVLPGKSLRLSCAGSGFGFPLYAMQWVRRAPGKGLEWVALVSYDSSNIRYADSVKGRFTISRDNSQNTLYLQMDSLRPEDTAMYYCARDNALQDGRPGYFDSWGQGTLVTVSS

SEQ ID NO: 826 - protein, 123 aa, Homo sapiens
EVQLVESGGGLVKPGGSLRLSCAASGFIFSDYYMSWIRQAPGKGLEWVSYITGSGRTIHYADSVKGRFTISRDNAKNSVYLQMNSLRAEDTAVYYCARGHRFLEFPLNYFDPWGQGTLVTVSS

SEQ ID NO: 827 - protein, 123 aa, Homo sapiens
EVQLLESGGHVVLPGKSLRLSCAGSGFGFPLYAMQWVRRAPGKGLEWVALVSYDSSNIRYADSVKGRFTISRDNSQNTLYLQMDSLRPEDTAMYYCARDNALQDGRPGYFDSWGQGTLVTVSS

SEQ ID NO: 828 - protein, 130 aa, Homo sapiens
EVQLVESGGGVVQPGRSLRLSCAASGFTFSKFAMHWVRQAPGKGLEWVAIISYDGSHKNYADSVKGRFTISRDNSKNTVYLQVDSLRAEDTAVYYCALLYGSGSYYNFVFFGWKDGSDAWGPGTTVTVSS

SEQ ID NO: 829 - protein, 129 aa, Homo sapiens
QVQLVQSGAEVKKPGSSVKVSCKASGGMFTDYAISWVRQAPGQRLEWMGGILPAFAASGSPGYAPIFRGRATFSADVSTSTAYLELTNLKPEDTAVYYCARDPSILNTGNHHWYDLDLWGQGTEVTVSS

SEQ ID NO: 830 - protein, 126 aa, Homo sapiens
QVQLVQSGAELKKPGSSVRVSCKAAGGTLTNYAISWVRQAPGQGFEWMGGIMPVSHTAGYAQKFQGRVTFTADESATTAYMDLTSLRPEDTAIYYCARDPSIHYTGNHHWYDLDIWGQGTMVTVSS

SEQ ID NO: 831 - protein, 126 aa, Homo sapiens; identical to SEQ ID NO: 830

SEQ ID NO: 832 - protein, 129 aa, Homo sapiens
QVQLVQSGAEVKKPGSSMRVSCRVSGGTFITHAMSWVRQAPGQGPEWMGGIVPLFGRASYAQPSQTRVQITADESTSTVYLEVPSLTSEDTAVYYCVRDSEPYTATRSQNHYWYDMDVWGQGTTVTVSS

SEQ ID NO: 833 - protein, 126 aa, Homo sapiens
QVQLVQSGAELKKPGSSVRVSCKAAGGTLTNYAISWVRQAPGQGFEWMGGIMPVSHTAGYAQKFQGRVTFTADESATTAYMDLTSLRPEDTAIYYCARDPSIHYTGNHHWYDLDIWGQGTTVTVSS

SEQ ID NO: 834 - protein, 126 aa, Homo sapiens
QVQLVQSGAEVKKPGSSVKVSCKASGGTLSHYAISWVRQAPGQGLEWMGGIMPVSGTVGYAQKFQGRVKFTADEYASTAYMELTNLRSEDSAVYFCARDPSIVDSGPHHWYDLDIWGQGTMVTVSS

SEQ ID NO: 835 - protein, 116 aa, Homo sapiens
QVQLVESGAEVKRPGASVKVSCKASGYAFSDYYMHWVRQAPGQGPEWMGWINPNSGDTGYPQKFRGWVTMTRDTSVSTAYMELKRLKSDDTAVYYCASGPNYFDYWGQGTLVTVSS

SEQ ID NO: 836 - protein, 125 aa, Homo sapiens
EVQLLESGGGLVKPGGSLRLSCEASGFTFSNYNMNWVRQAPGKGLEWVSSISGSSSYISYADSVKGRFTISRDNAKNSLYLQMNSLRVEDTAVYYCARADRDYDFWSDPPLIDHWGQGTLVTVSS

SEQ ID NO: 837 - protein, 120 aa, Homo sapiens
EVQLVESGGGLIQPGGSLRLSCAASGFTVTDNYMSWVRQAPGKGLEWVSVLYSGGSTYYADAVQGRFSISRDNSKNALYLQMNSLRAEDTAVYYCARGFGNGWSYYFDYWGQGTLVTVSS

SEQ ID NO: 838 - protein, 129 aa, Homo sapiens
EVQLVQSGGGLVQPGGSLRLSCAASGFTFSSYSMSWVRQAPGKGLEWVSYITRSSDNIYYAESVKGRFTISRDSAKNSLYLHMNSLRDEDTAVYYCARDPGLEYSGNYFSYYYYAMDVWGQGTTVTVSS

SEQ ID NO: 839 - protein, 129 aa, Homo sapiens
QVQLVQSGAEVKKPGSSVKVSCKASGGTFSTHAISWVRQAPGHGPEWMGGIIPLFGTSESAQRFQARVRFTADESTSTAYMELSSLTSEDTAVYYCVRDSDPYTATSRNNHYWYDMDVWGQGTTVTVSS

SEQ ID NO: 840 - protein, 126 aa, Homo sapiens
QVQLVQSGAEVKKPGSSVKVSCKVSGGRFSDYAISWLRQAPVKGLEWMGGIIPRLNRKGYSQDFQGRLTFTADESTSTAYMELSGLTSEDTAVYYCARDPTFLNSGNHFWYAVDIWGQGTTVTVSS

SEQ ID NO: 841 - protein, 129 aa, Homo sapiens
EVQLVESGAEVRTPGSSVKLSCKASGGTFSTHAFSWVRQAPGQRPEWMGGIIPIFGESKDTQKFQGRVTFTADESTTTVYMELRSLKSDDTAIYYCVRDSDPYTATYRNNHYWYAMDVWGQGTTVTVSS

SEQ ID NO: 842 - protein, 120 aa, Homo sapiens
EVQLVESGGGVVKPGGSLRVSCVGSGFTFSDHYMSWIRQAPGKGLEIISYISTDGSYINDADSVKGRFINSRDNAKNSVYLQLNSLRAEDTAVYYCARMGPSGSGSLDYWGQGSLVTVSS

SEQ ID NO: 843 - protein, 125 aa, Homo sapiens
EVQLVESGPTLVKPTQTLTLTCTFSGFSLNTRELGVGWIRQPPGKALEWLALIYWDDDKRYSPSLKSRLSITKDTSKNQVVLTLTNMDPGDTATYYCAHTSELPPRRPYAAFDFWGQGTLVTVSS

SEQ ID NO: 844 - protein, 116 aa, Homo sapiens
EVQLVESGGGVVQPGGSLRLSCVASGFPFGRYAMHWVRQAPGQGLEWLTLISFDSSNIEYSDSVQGRFTISRDNSRNTLFLQMTSLRPEDTAVYFCARDLPPLDYWGQGTLVTVSS

SEQ ID NO: 845 - protein, 126 aa, Homo sapiens
QVQLQQWGAGLLKPSETLSLTCAVNGGSFNNYYWSWIRQPPGKGPEWIGEVVHSGSTTYNPSLKSRVTISIDMSKNQFALKLNSVTAADTAVYYCARGFTFTYSDFLTGQRTFEYWGQGTLVTVSS

SEQ ID NO: 846 - protein, 120 aa, Homo sapiens
EVQLVESGGGVVQPGRSLRLSCAASGFTFSSYAMHWVRQAPGKGLEWVALISYDGDKKYYPDSVRGRFTISRDNSKNTLHLQMNSLRLEDTAVYYCARSYGGSYSTVGYWGQGALVTVSS

SEQ ID NO: 847 - protein, 120 aa, Homo sapiens
QVQLVQSGGDSVNPGGSLRLSCAGSGFSVRDVWMSWVRQAPGKGLEWIGRIKSEADGGSSDYRASLKDRFSIWRDASKNTLYLQVNGLQTEDTAIYFCSWNDVGWAFTFWGQGTLVTVSS

SEQ ID NO: 848 - protein, 124 aa, Homo sapiens
QVQLVQSGAEVKKAGSSVKVSCKASGGPFSSFAISWVRQAPGQGLEWLGGIMTVFGPAHYAQKSRDRISITADESTSTSYLELSSLTSDDTAVYYCAAEERSGTNHNYYGLDVWGQGTTVTVSS

SEQ ID NO: 849 - protein, 124 aa, Homo sapiens
EVQLVESGGGLIQPGGSLRLSCAASGFPFSGTYMTWVRQAPGKGLEWVSIIYSGGDTYYADSVKGRFTISRDNSKNTLFLQMNSLRVEDTAMYYCARDREMAIITERSYGLDVWGQGTMVTVSS

SEQ ID NO: 850 - protein, 125 aa, Homo sapiens
EVQLVESGGGLVQPGGSLRLSCGASGFTFSDYAMSWVRQAPGKGLEWVSTISGSGDKTYYADSLKGRFTNSRDNSKSTLYLQMTSLRAEDTAVYFCAKDRYCSGGSCFYDAFDIWGQGTTVTVSS

SEQ ID NO: 851 - protein, 122 aa, Homo sapiens
EVQLVESGGGVVQPGRSLRLSCEASGFTFADYPMHWVRQAPGKGLEWVAVISSHGRSQGYAASVKGRFTFSRDNSQSSLFLQLNSLRVEDTAVYFCAREAQSSGRAGCLDAWGQGTLVTVSS

SEQ ID NO: 852 - protein, 126 aa, Homo sapiens; identical to SEQ ID NO: 830

SEQ ID NO: 853 - protein, 129 aa, Homo sapiens
QVQLVQSGAEVREPGSSVKLSCKTSGGTFSTHAISWVRQAPGQRPEWMGGIMPIFGESKDTQKFQGRVTFTADESTTTAYMELRSLKSDDTAIYYCVRDSDPYTATVRSNHYWYAMDVWGQGTTVTVSS

SEQ ID NO: 854 - protein, 126 aa, Homo sapiens
EVQLVQSGAEVKKPGSSVKVSCKVSGGRFSDYAISWLRQAPVKGLEWMGGIIPRLNRKGYSQDFQGRLTFTADESTSTAYMELSGLTSEDTAVYYCARDPTFLNSGNHFWYAVDIWGQGTTVTVSS

SEQ ID NO: 855 - protein, 127 aa, Homo sapiens
QVQLQESGRGLVKPSETLSLTCTVSGGSITSSRYYWGWIRQPPGRNLEWIGSIHYSGTTSYNPSLWSRVAISVDTAQNQFSLRLNSVTAADTAVYYCAAPAPSNHESWSGTDWFDPWGQGILVTVSS

SEQ ID NO: 856 - protein, 123 aa, Homo sapiens
QVQLVQSGAEVKGPGASVKVSCKVSGYSFITYDITWVRQAPGQGLEWMGWISTKSGDTRYAQNVQGRVTMTTDTSTNTAYMELRNLKSDDTALYYCARTTPRGWEQWPVLEYWGQGTLVTVSS

SEQ ID NO: 857 - protein, 124 aa, Homo sapiens
EVQLVESGGGLVQPGGSLRLSCEASGFNFNSYSMSWVRQAPGKGLEWLSYISSRSSTIKYASSVQGRFTVSRDNAKKSVYLQMNSLRDEDTAVYFCARELDSETYYNYNSLDVWGQGTTVTVSS

SEQ ID NO: 858 - protein, 128 aa, Homo sapiens
QVQLVESGGEVKKPGASVKVSCKASGYTLSSYPISWVRQAPGHGLEWMGWINTYNGRTNYEQMLQGRVTMTTDTSTSTAYMELRSLRSDDTAVYYCARVVFRHGQYDDSSGRLAFDIWGQGTMVTVSS

SEQ ID NO: 859 - protein, 126 aa, Homo sapiens; identical to SEQ ID NO: 830

SEQ ID NO: 860 - protein, 129 aa, Homo sapiens
EVQLLESGAEVKKPGSSVKVSCKTSGGTFSTHAISWVRQAPGQGPEWMGGIIPLFGTSEHAQRFQARVKFTADESTSTAYMELSSLTPEDTAVYYCVRDSDPYTATSRNNHYWYGMDVWGQGTTVTVSS

SEQ ID NO: 861 - protein, 122 aa, Homo sapiens
EVQLLESGGGVVQPGTSLRLSCAVSGFMFKNYAIHWVRQAPGKGLEWVAVISFDGSDISYTESVQGRFTISRDNSENMLYLQMNSLRAEDTAMYYCAREPDGIGAAGISGYWGQGTLVTVSS

SEQ ID NO: 862 - protein, 123 aa, Homo sapiens
EVQLVESGGGLVKPGGSLRLSCVASGFTFSDFYMSWIRQAPGKGLEWVSYISGSGDTIYYADSVKGRFTVSRDNAKNSLFLQMSSLGAEDTAMYYCAREMATSFGYYFVLDVWGQGTTVTVSS

SEQ ID NO: 863 - protein, 124 aa, Homo sapiens
QVQLQQWGAGLLKPSETLSLSCAVYGGSFSGFYWSWIRQPPGKGLEWIGEINHSGSANYNPSLMSRVTISMDTSKKQFSLQLRSVTAADTAVYYCARGQESPIVGVTGRWFDPWGQGTLVTVSS

SEQ ID NO: 864 - protein, 121 aa, Homo sapiens
EVQLVESGGGVVQPGRSLRLSCAASEFTFSTYAMHWVRQAPGKGLEWVALISYDGINKYYADSVKGRFAISRDNSKNTLYLQVNSLRADDTAVYYCVRPYSGSYTNWFDLWGQGTLVTVSS

SEQ ID NO: 865 - protein, 126 aa, Homo sapiens
QVQLVQSGAEVKKPGSSVKVSCKASGGMLSDYAISWVRQAPGQRLEWMGGIMPAFGSPGYAQIFRGRATISADVSTSTAYLELTSLKPEDTAVYYCARDPSILNTGNHHWYDLDIWGQGTMVTVSS

SEQ ID NO: 866 - protein, 126 aa, Homo sapiens
QVQLVQSGAEVKMPGSSVKVSCKVSGGRFSDYAISWLRQAPLEGLEWMGGIVPHLNRKGYSQKFQDRLTFTADDSTSTAYMELSGLTSEDTAVYYCARDPTFLNTGNHFWYAVDIWGQGTTVTVSS

SEQ ID NO: 867 - protein, 129 aa, Homo sapiens
QVQLVQSGAEVKKPGSSVKVSCKASGGTFSTHAISWVRQAPGHGPEWLGGILPLFGTSESAQRFQARVKITADESTSTAYMELSSLTSEDTAVYYCVRDSDPYTATSRNNHYWYAMDVWGQGTTVTVSS

SEQ ID NO: 868 - protein, 126 aa, Homo sapiens
QVQLVQSGAEVKKPGSSVKVSCKVSGGTFSNYAISWLRQAPGQGPEWMGGIIPALSRVGYVRKFQARLTISADELTTTAYMDLSSLTSEDTAVYYCARDPSFLNTGNHFWYDFDLWGQGTTVTVSS

SEQ ID NO: 869 - protein, 126 aa, Homo sapiens
QVQLQQWGAGLLKPSETLSLTCAVYGGSFSGFYWTWIRQPPGKGLEWIGEINHSGSSNYDLSLKSRVTMSVDTSKNQFSLKLSSVTAADTAVYYCARGMISPRIPRTTRQRWFDTWGQGTLVTVSS

SEQ ID NO: 870 - protein, 127 aa, Homo sapiens
QVQLQQWGAGLLKPSETLSLTCGVYGGSFSGYFWSWIRQSPGKGLEWIGEINHSRSMSYNPSLKSRITMSVDTSKNQFSLNLNSVTAADTAVYFCARGKAHRNDFWSGYYPHWFDPWGQGILVTVSS

SEQ ID NO: 871 - protein, 129 aa, Homo sapiens
QVQLVQSGAEVKKPGSSVKISCKISGDTFSTNAISWLRQAPGREPEWMGGIVPLVGPASYAQRPQGRLTITADEFTNTAYLELNSLRSEDTATYYCARDSDPYTATRRHNHYWYAMDVWGQGTTVTVSS

SEQ ID NO: 872 - protein, 129 aa, Homo sapiens
EVQLLESGPGLVKPSETLSLTCTVSGGSINSQYWNWIRQSPGKGLEWIGYVYYSGSTNYNPSLKSRVTMSVDTSKNHFSLNLRSVTAADTAVYYCARGLVVRYFDGFPSGPIIGAFDIWNQGTTVTVSS

SEQ ID NO: 873 - protein, 129 aa, Homo sapiens
QVQLVQSGAEVKKPGSSVKVSCKVSGGTFSSHAISWVRQAPGQRPEWMGGIMPIFGESKDTQKFQGRVTFTVDESTNTAYMELTSLKSEDTAIYYCVRDPDPYTATVRHNHYWHGMDVWGQGTTVTVSS

SEQ ID NO: 874 - protein, 129 aa, Homo sapiens
QVQLQQWGAGLLKPSETLSLTCAVYGGSFSGFHWSWIRQPPGKGLEWIGEVNHSGSTKYNPSLKSRVTVSVDTSKNQFSLRLSSVTAADTAIYYCARGSLSREYDFLTAPQNGPWFDSWGQGALVTVSS

SEQ ID NO: 875 - protein, 129 aa, Homo sapiens
EVQLLESGPGLVKPSETLSLTCTVSGGSISSNNLYWGWIRQPPGKGLEWIGSIYYSGSTYYNPSLKSRVIIPVDTSKDQFSLRLSSVTAADTAVYYCARHSQKDIVLIPAAQSPIFDYWGQGTLVTVSS

SEQ ID NO: 876 - protein, 121 aa, Homo sapiens
EVQLVESGGGLVQPGGSLRLSCSASGFTFSRYAMHWVRQAPGKGLEYVSAINLNGDSTYYTDSVRGRFTISRDNSKNTLFLQMSNVRPEDTAFYYCVKDGGYYDSSGPGHWGQGTLVTVSS

SEQ ID NO: 877 - protein, 122 aa, Homo sapiens
QVQLVQSGGGVVQPGGSLRLSCADSGNAFIANPMHWVRQAPGKGLEWLALISTDGNNRHYADSVKGRFTFSRDNSKNSLYLQMDSLRPEDTGVYYCARESRSSGRAGCFDSWGQGTLVTVSS

SEQ ID NO: 878 - protein, 121 aa, Homo sapiens
QVQLVESGGGVVQPGTSLRLSCAATGFTFTTYPMHWVRQAPGKGLEWVAVISYDGMNQYYADFLKGRFTISRDNSKNTLYLQMNSLRADDTAVYYCARAYGGNYQNHFDHWGQGTLVTVSS

SEQ ID NO: 879 - protein, 132 aa, Homo sapiens
EVQLVQWGAGLLKPSETLSLRCAVYGGSFNGFYWTWIRQAPGQGLEWIAEINHSGTTNYNPSLKSRVTISIDTSKKQFSLSLKSVTAADTAMYFCARGTISPIVGVPTPVVPRRGRSWFDPWGQGTLVTVSS

SEQ ID NO: 880 - protein, 129 aa, Homo sapiens
QVQLVQSGAEVKKPGSSVKVSCKASGGTFSTHAISWVRQAPGHGPEWLGGIIPLFGTSESAQRFQARVKITADESTSTAYMELSSLTSEDTAVYYCVRDSDPYTATSRNNHYWYAMDVWGQGTTVTVSS

SEQ ID NO: 881 - protein, 129 aa, Homo sapiens
QVQLVQSGAEVREPGSSVKLSCKTSGGPFSTHAFSWVRQAPGQRPEWMGGIMPVFGESKDTQKFKGRVTFTADASTTTTYMELRSLKSDDTAIYYCVRDSDPYTATSSHNHYWYAMDVWGQGTTVTVSS

SEQ ID NO: 882 - protein, 118 aa, Homo sapiens
QVQLVESGGGLVKPGGSLRLSCAASGFTFSDYYMIWIRQAPGKGLEWLSYISHTASTIYYADSVKGRFTISRDNAKNSLFLQMNSLTAEDTAVYYCARDRGSGVIDPWGQGTLVTVSS

SEQ ID NO: 883 - protein, 121 aa, Homo sapiens
QVQLVESGGGLVQPGGSLRLSCSASGFTFSRFAMHWVRQAPGKGLEYVSAINLNGDSTYYTDSVRGRFTISRDNSKNTLYLQMSSVRPDDTAFYYCVKDGGYYDSSGPGHWGQGTLVTVSS

SEQ ID NO: 884 - protein, 128 aa, Homo sapiens
EVQLVESGPGLVKPSETLSLTCTVSGASVTAGSSYWGWIRQPPGKGLEWIGYMFSSGNTKYNPSLKSRVTISADTSKNQFSLRLSSVTAADTAVYFCARVGWVRYFDWSKPYYYFDLWGRGTLVTVSS

SEQ ID NO: 885 - protein, 128 aa, Homo sapiens
EVQLVESGGGLVQPGGSLRLSCAASGFTFSTSAMSWVRQAPGKGLEWVSRIGGGGGRTKYADSVKGRFTISRDNSKNTLYLQMNSLRADDTAVYYCAKCDLVRYFDWLGEENNWFDPWGQGTLVTVSS

SEQ ID NO: 886 - protein, 129 aa, Homo sapiens
QVQLVQSGAEVRKPGSSVKLSCKASGGTFSTHAISWVRQAPGQRPEWMGGIMPIFGESKDTQKFQGRVTFTADESTTTAYMELRSLKSDDTAIYYCVRDSDPYTATVRNNHYWYALDVWGPGTMVTVSS

SEQ ID NO: 887 - protein, 123 aa, Homo sapiens
EVQLVESGGGLSQPGGSLRLSCAASGFTVRTYCMNWVRQAPGKGLEWVSLVCGDNIDYYPDSVKGRFSISRDDSKNTLLLHMDSLRVEDTAVYYCARATPPGGGTGWPYFDFWGQGTLVTVSS

SEQ ID NO: 888 - protein, 123 aa, Homo sapiens
QVQLVQSGAEMRKPGSSVKVSCKASGGTFSRYCFSWVRQAPGQRLEWMGGIMSILGAHYAQKFQGRVTFTADESTNTAYMELISLTSEDTAVYYCAREEPSGTYHNYYGLDVWGQGTTVTVSS

SEQ ID NO: 889 - protein, 130 aa, Homo sapiens
QVQLQESGPGLVKPSGTLSLTCAVSGGSISSSDWCSWVRQPPGKGPEWIAEISHSGSTNYNPSLKSRVTMSVDRSKNQFSLNLNSVTAADTAVYYCAARIRGATHYDFWSGFWAGPFDIWGQGTTVTVSS

SEQ ID NO: 890 - protein, 126 aa, Homo sapiens
EVQLQESGPGLVKPSGTLSLTCGVSGVSISSSSWWSWVRQPPGRGLEWIGEISPSGSTSYNPSFRSRLTMSVDKSRNQLSLKLSSVTAADTAVYYCARTQSNDFWSGYYTAAFDLWGQGTMVTVSS

SEQ ID NO: 891 - protein, 129 aa, Homo sapiens
QVQLVQWGAGLLKPSETLSLTCAVYGGSFSGFHWSWIRQPPGKGLEWIGEINHSGSTKYNPSLKSRVTISVDTSKNQFSLRLRSVTAADTAIYYCARGSLSREYDFLTAPQNGPWFDSWGQGALVTVSS

SEQ ID NO: 892 - protein, 124 aa, Homo sapiens
EVQLVESGPELKKPGSSVRVSCKASGGSFSNFAVSWVRQAPGQRLEWMGGVIPRFGRSEYVQKFQGRVTITVDEAASTAYMELSSLRSEDTAIYYCVLDTTSANPHNWYGMDVWGQGTTVTVSS

SEQ ID NO: 893 - protein, 120 aa, Homo sapiens
QVQLVQSGGGVVNPGGSLRLSCVGSGFTFSDYYMGWIRQAPGKGLEVISYISSTGSYIRDADSVKGRFTISRDNAENSVYLQMNSLRGEDTAVYYCARMGPYGSGSFDYWGLGTLVTVSS

SEQ ID NO: 894 - protein, 123 aa, Homo sapiens
QVQLQESGPGLVRPSETLSLTCTVSGDSVSSSDYHWGWIRQPPGKGLEWIGSIYYGGRSHFNPSLKSRVAIFVDTSNNQFSLRLNSVTASDTAVYFCAGRHQELLPMGSFDMWAQGTTVTVSS

SEQ ID NO: 895 - protein, 126 aa, Homo sapiens
PGPACTVWAEVKKPGSSVKVSCKASGGMFSDYAISWVRQAPGQRLEWMGGIMPGLGSPGYAQIFRGRATISADVSTSTAYLELTSLKPEDTAVYYCARDPSILNTGNHHWYDLDIWGQGTQVTVSS

SEQ ID NO: 896 - protein, 122 aa, Homo sapiens
QVQLVQSGAEVKKPGSSVKVSCKASGGTSSTHAISWVRQAPGQGLEWMGGIIPIFGTTNYAQKFQDRVTITADESTSTAYMELSSLRSEDTAVYFCVRDGAYDSSGYYSTQWGQGTLVTVSS

SEQ ID NO: 897 - protein, 126 aa, Homo sapiens; identical to SEQ ID NO: 854

SEQ ID NO: 898 - protein, 126 aa, Homo sapiens
QVQLVQSGAEVKKPGSSVTVSCKVSGGRFSDYAISWLRQAPVEGLEWMGGIIPHLNKKGYSQKFQDRITFTADESTSTAYMELSGLTSEDTAIYYCARDPTFLNTGNHFWYAVDIWGQGTTVTVSS

SEQ ID NO: 899 - protein, 127 aa, Homo sapiens
QVQLVQSGAEVKKPGASVKVSCKASGYTFSLFHVHWVRQAPGQGLEWMGWINPHNGDTTFAERFQGRVALTRDTSINTAYMELSRLTSDDTAVYFCARDFGVRYDDSRQLMKYCDSWGQGTLVTVSS

SEQ ID NO: 900 - protein, 126 aa, Homo sapiens
QVQLVQSGAEVKKPGSSVKVSCKASGGTLADYAISWVRQAPGQGLEWMGGIKPLHGAAGYSQLFRGRLSITADESASTAYMELTGLTSDDTAMYYCARDPSILNTGNHHWYDLDLWGQGTTVTVSS

SEQ ID NO: 901 - protein, 124 aa, Homo sapiens
QVQLVQSGPELKKPGSSVRVSCKASGGSISSYAISWVRQAPGQRLEWMGGVLPMMGRESPVQKFKDRVTIAADESTSTAYMELRSLSAEDTAVYYCVVDTTMADPHNWYGLDVWGQGTTVTVSS

SEQ ID NO: 902 - protein, 130 aa, Homo sapiens
QVQLVQSGPGLVRPSGTLSLTCAVSGDSISGDYWCTWVRQTPGKGLEWIGKISHSGSINYNPSLKSRITMSVDKSKNQFSLKLNSVTAADTAMYYCARVRVGASHHNFWSGYYTDAFDIWGQGTTVTVSS

SEQ ID NO: 903 - protein, 126 aa, Homo sapiens
QVQLVQSGAEVKKPGSSVKVSCKVSGGTFSNYAISWLRQAPGQGPEWMGGIIPALSRVGYARKFQARLTISADELTTTAYMDLSSLTSEDTAVYYCARDPSFLNTGNHFWYDFDMWGQGTTVTVSS

SEQ ID NO: 904 - protein, 122 aa, Homo sapiens
EVQLQQSGAEVKKPGSSVKVSCKASGGTSSTHAISWVRQAPGQGLEWMGGIIPIFGTTNYAQKFQDRVTITADESTSTAYMELSSLRSEDTAVYFCVRDGAYDSSGYYSTQWGQGTLVTVSS

SEQ ID NO: 905 - protein, 123 aa, Homo sapiens
EVQLVESGGGLVKPGGSLRLSCAASGFTFSDYYMNWVRQAPGKGLEWVSSISSSSYMYYADSMKGRFTISRDNAQNSLYLQMSSLRAEDTAVYYCARDFPGDTAVAGTGFNYWGQGTLVTVSS

SEQ ID NO: 906 - protein, 128 aa, Homo sapiens
QVQLVESGGDLVKPGRSLRLSCTASGFTIGDYAMTWFRQAPGKGLECVAVIRSRAFGGTTEYAASVKGRFIVSRDDSNSVAFLQMNSLKTEDTAVYYCSRDLRRGYYDSNGHQQFDLWGQGTLVTVSS

SEQ ID NO: 907 - protein, 136 aa, Homo sapiens
QVQLVESGGGVVQPGRSLRLSCAASGFTFSRYGMHWVRQAPGKGLEWVAVIYSDGRNEYYADSVKGRFTISRDNSKNTLHLQMNSLGAADTAVYYCARDPGPITFFDWSPDKSRKSYYDYNGMDVWGQGTTVTVSS

SEQ ID NO: 908 - protein, 116 aa, Homo sapiens
EVQLLESGGGVVQPGTSLRLSCVASGFTFSTFAMHWVRQAPGKGLEWVALISFDSTNIRYANSVRGRFTISRDNSKNTLYLEVDSLRIEDTGVYYCARDLPPLDYWGQGTLVTVSS

SEQ ID NO: 909 - protein, 129 aa, Homo sapiens
QVQLVQSGAEVRKPGSSVKLSCKASGGTFSTHAISWVRQAPGQRPEWMGGIIPIFGESKDTQKFQGRVTFTADESTTTAYMELRSLRSDDTAIYYCVRDSDPYTTTFSHNHYWYAMDVWGQGTTVTVSS

SEQ ID NO: 910 - protein, 125 aa, Homo sapiens
QVQLVQSGGGLVQPGGSLRVSCSASGFTFSSFAMHWVRQAPGKGLEYVAGISDNGHTTMYADSVKGRFTISRDNSKNTLYLQLSSLRPEDTAVYFCVKDNVILPGAIVRPQFDYWGQGTLVTVSS

SEQ ID NO: 911 - protein, 126 aa, Homo sapiens
QVQLVQSGAEVKKPGSSVKVSCKVSGGMFSDYAISWVRQAPGQRLEWMGGIMPGLGSPAYAQIFRGRVTISADISTSTAYLEVTSLRPEDTAVYYCARDPSILNTGNHHWYDLDMWGQGTTVTVSS

SEQ ID NO: 912 - protein, 125 aa, Homo sapiens
EVQLVESGGGVVQPGRSLRLSCVASGFTLAPYGMQWVRQAPGKGLEWVAFLSHDGSHLGYVDSVKGRFTISRDNSKNTLYLEMNSLRAEDTATYYCARDNVVQQNADNVGYFDFWGQGSLVTVSS

SEQ ID NO: 913 - protein, 126 aa, Homo sapiens
QVQLVQSGAEVKKPGSSVKVSCKASGGMFRDYAISWLRQAPGQRLEWMGGIMPAFGAPGYAQIFRGRATISADVSTTTAYLELTSLMPDDTAVYYCARDPSILNTGNHHWYDLDLWGQGTTVTVSS

SEQ ID NO: 914 - protein, 129 aa, Homo sapiens
QVTLKESGAEVKKPGSSVKVSCKTSGGTFSTHAISWVRQAPGQGPEWMGGIIPLFGTSQHAQRFQARVKFTADESTNTAYMELSSLTPEDTAVYYCVRDSDPYTATSRNNHYWYGMDVWGHGTTVTVSS

SEQ ID NO: 915 - protein, 126 aa, Homo sapiens
QVQLVQSGAEVKKPGSSVKVSCKASGGMFSDYAISWVRQAPGQRLEWMGGIMPGLGSPAYAQSFGGRVTISADISTSTAYLEVTSLRPEDTAVYYCARDPSILNTGNHHWYDLDMWGQGTMVTVSS

SEQ ID NO: 916 - protein, 126 aa, Homo sapiens
EVQLVESGGGLVQPGRSLRLSCSASGFSFGDYAMSWFRQAPGKGLQWVGLIKTRAYGAATDYAASVQGRFIISRDDSKSIAYLQMNSLKTEDTAVYFCAREGTSLGYYYYYAMDVWGHGTTVTVSS

SEQ ID NO: 917 - protein, 126 aa, Homo sapiens
QVQLVQSGAEVKKPGSSVKVSCKASGGMFSDYAISWVRQAPGQRLEWMGGIMPGLGSPAYAQIFRGRVTISADISTSTAYLEVTSLRPEDTAVYYCARDPSILNTGNHHWYDLDMWGQGTTVTVSS

SEQ ID NO: 918 - protein, 122 aa, Homo sapiens
EVQLVESGGGLVQPGGSLRLSCLTSGFSFSSYWMIWVRQAPGKGLEWVANIEPDGNEEYYVDSVKGRFTISRDNAKNSLYLQMNSLRAEDTAVYYCARGPIRHFGLDAFDIWGQGTTVTVSS

SEQ ID NO: 919 - protein, 129 aa, Homo sapiens
QVQLVQSGDEMKKPGSSVKVSCKASGDTFSTHAISWVRQAPGQGPEWMGGIIPLFGTASYAQTSQSRVKITADESTSTAYMELSSLTSEDTAVYYCVRDSDPYTATSRNNHYWYGMDVWGQGTTVTVSS

SEQ ID NO: 920 - protein, 126 aa, Homo sapiens; identical to SEQ ID NO: 915

SEQ ID NO: 921 - protein, 122 aa, Homo sapiens
EVQLVESGGGLVQPGGSLRLSCSASGFTFSNYAMYWVRQAPGKRPEYVSGISSNGGITYYADSVEGRFTVSRDNSKKSLYLQMSSLRPEDTAVYYCVKDLGATVTYDVFDVWGQGTMVTVSS

SEQ ID NO: 922 - protein, 120 aa, Homo sapiens
EVQLVESGGGLVQPGGSLRLSCAASGFTFSSYSMSWVRQAPGKGLEWVSGHDGGTTHYADSVKGRFTISRDDSMNTLSLQMNSLRAEDTAVYYCAKERDLPGRGGYFDHWGQGTLVTVSS

SEQ ID NO: 923 - protein, 129 aa, Homo sapiens
QVQLQQWGAGLLKPSETLSLTCAVYGGSFRGFYWTWIRQPPGKGLEWIGEVSHSGETNYNPSLKSRVTISVDTSKNQFSLNLISVTAADTSVYYCARGYTAPIIREVPITFRPRWFDPWGQGTPVTVSS

SEQ ID NO: 924 - protein, 120 aa, Homo sapiens
QVQLVQSGGGVVNPGGSMRLSCAGSGFTFSDHYMGWIRQAPGKGLEVISYISSSGSFIRDADSVKGRFTISRDNAKNSVYLQMNSLRAEDTAVYYCARMGPYGSGTFDYWGQGTLVTVSS

SEQ ID NO: 925 - protein, 123 aa, Homo sapiens
QVQLVQSGGNVVQPGGSLRLSCVGSEFSITFFAMQWVRRTPGKGLEWVALVSHDGSNIRYSDSVKGRFIISRDNAKNTLYLQLDSLTPEDTGIYYCARDHALQNGRPGYFDSWGQGSQVTVSS

SEQ ID NO: 926 - protein, 121 aa, Homo sapiens
QVQLVQSGGGLVQPGGSLRLSCSASGFTFNTYAMHWVRQAPGKRLEYVSSITRDGAGKFYADSVKGRFTISRDNSKNTLYQQMSSLRPEDTAVYYCVREGQQWLGLYFDHWGQGALVTVSS

SEQ ID NO: 927 - protein, 125 aa, Homo sapiens
QVQLVQSGAEVKKPGASVKVSCRASGYTFSGYDINWVRQATGQGLEWMGWMNPNSGDTGYAHKFQGRVTMTRNSSISTAYMELSSLTSEDTAVYFCAREKKSFGPQYYYGSGEDWGQGTLVTVSS

SEQ ID NO: 928 - protein, 127 aa, Homo sapiens
EVQLVQSGAEMKKPGESLKISCKGSGYSFPNYWIGWVRQMPGKGLEWMAIMWPSDSDTRYSPSFQGQVTISADTSTSTVYLQWGSLKASDTAMYYCVRQRYCSGGSCFLFEDAFEIWGQGTMVTVSS

SEQ ID NO: 929 - protein, 117 aa, Homo sapiens
EVQLVESGGGLVQPGGSLRLSCAASGFIFKNEPMNWIRQFPGKGLEWISNIRDNGNDVYYADSVKGRFTVSRDNAKNSLYLQMNSLRDDDTALYYCVRDTDWAFDSWGQGTLVTVSS

SEQ ID NO: 930 - protein, 125 aa, Homo sapiens
EVQLVESGPTLVKPTQTLTLTCTFSGFSLTTRRQGVGWLRRPPGKALEWLALIYWDDDKRYSPSLKSRLTITKDTSKNHVVLSLTNVGPADTATYYCAHTSELPPRRPYAAFDFWGQGTLVTVSS

SEQ ID NO: 931 - protein, 115 aa, Homo sapiens
EVQLLESGGGLVQPGGSLRLSCAASGFPFSTDAMNWVRQAPGEGLEWVSTISDSGRDTYYAASVRGRFTISRDNSKNTVYLQMNSLRVEDTAVYYCANTNFLDYWGQGTLVTVSS

SEQ ID NO: 932 - protein, 127 aa, Homo sapiens
EVQLQESGPGLLKPSETLSLTCTVSGSPIASNYWSWVRQPAGKGLEWIGRIDTSPTTDYNPSLKSRVIMSVDTSTSQFSLKMSSVTAADTAVYYCTRSFISFDSSGHPYYYYAMDVWGQGTTVTVSS

SEQ ID NO: 933 - protein, 118 aa, Homo sapiens
QVQLVQSGAEVRKPGSSVKLSCRASGGTFHTYTVNWVRQAPGQGLEWLGGIIPIFGTPTYAQRFQGKVSITADSSTNTVFMELTSLTSEDTAVYYCTRETGTDEFDFWGQGALVTVSS

SEQ ID NO: 934 - protein, 127 aa, Homo sapiens
EVQLVESGPGLVKPSGTLSLTCAVSGASVSSDHWWSWVRQSPGKGLEWIGEVYHSGSTNYNPSLKSRVTISLDQSNNQFSLKLTSVTAADTAIYYCATMWGGLCTASNCYGNPMDVWGQGTTVTVSS

SEQ ID NO: 935 - protein, 127 aa, Homo sapiens
EVQLVESGPGLVKPSGTLSLTCAVTGASVSSDHWWSWVRQSPGKGLEWIGEVYHSGSTNYNPSLKSRVTISLDQSNNQFSLKLTSVTAADTAIYYCATMWGGLCTASNCYGNPMDVWGQGTTVTVSS

SEQ ID NO: 936 - protein, 127 aa, Homo sapiens; identical to SEQ ID NO: 796

SEQ ID NO: 937 - protein, 118 aa, Homo sapiens
QVQLQESGGGLVQPGGSLRLSCEASGFSFSDFVMHWVRQVPGKGLEWVSRISHDGSITSYVDSVKGRFTVSRDNGKKTLYLQMNSPRTEDTAVYYCARDLAWTFFDYWGHGTLVTVSS

SEQ ID NO: 938 - protein, 123 aa, Homo sapiens
EVQLLESGGGLSRPGGSLRLSCAASGFIASRNCMQWVRQAPGKGLEWVSIICGDEITYIRDSVKGRFTISRDDSKNTLHLEMNSLRADDTAVYYCARATPPGGTTGWPYIDLWGQGTLVTVSS

SEQ ID NO: 939 - protein, 115 aa, Homo sapiens
EVQLLESGGGLVQPGGSLRLSCAASGFPFSTDAMNWVRQAPGEGLEWVSTISDTGRDTYYAASVKGRFTISRDNSKNTVYLQMNSLRAEDTAVYYCANTNFLDYWGQGTLVTVSS

SEQ ID NO: 940 - protein, 120 aa, Homo sapiens
EVQLVESGGGLVQPGRSLRLSCAASGFILDDYAVHWVRLAPGKGLEWVSGITWNSGYLGYADSVKGRFTISRDNAKNSLYLQMNSLRPEDTALYYCAKLGTDHPIGVDVWGQGTTVTVSS

SEQ ID NO: 941 - protein, 121 aa, Homo sapiens
QVQLVQSGGGLVQPGGSLRLSCSASGFTFNTYTMHWVRQAPGKGLEYVSAISSNGVVTYYADSVKGRFTISRDNSKNTLYLQMSSLRAEDTAVYYCVKALYSSSWCPFDYWGQGALVTVSS

SEQ ID NO: 942 - protein, 124 aa, Homo sapiens
QVQLQQSGGGLVQPGGSLRLSCEASGFNFNSYSMSWVRQAPGKGLEWLSYISSRSSTIKYASSVQGRFTVSRDNAKKSVFLQMNSLRDEDTAVYYCARELDSETYYNYNSLDVWGQGTTVTVSS

SEQ ID NO: 943 - protein, 123 aa, Homo sapiens
QVQLQESGPGLVRPSETLSLTCTVSRGSISSSYWSWIRQPPGKGLEWIGFMYYSGSTNYNPSLKSRVTISLDTSKNQFSLKLSSVTAADTAVYYCAKAQGIYYRGWSYWFDPWGQGTLVTVSS

SEQ ID NO: 944 - protein, 131 aa, Homo sapiens
EVQLVQSGAEVKKPGASVKISCKASGYAFRNNYINWIRQAPGQGLEWMGIINPSAGTSTYAQKFQGRVTMTRDTSTNTVYMEITSLRSEDTATYFCAREARRQVTQWFGEFWGPYNWFDPWGQGTLVTVSS

SEQ ID NO: 945 - protein, 124 aa, Homo sapiens
QVQLQQWGAGLLKPSETLSLTCGVYGVSFSDYYWSWIRQPPGKGLEWIGEINHSGITNYNPSLKSRVTISVDTSKNQFSLKLSSVTAADTAVYYCARGLISYTLWLRESYFDYWGQGTLVTVSS

SEQ ID NO: 946 - protein, 126 aa, Homo sapiens
QVQLVQSGAEVKKPGSSVKVSCKASGGSLRDYAISWVRQAPGQGPEWMGGIMPIFGTAGYAQKFQGRVKFTADESATTAYMELTGLRSEDSAVYFCARDPSILNTGNHHWYDLDIWGQGTTVTVSS

SEQ ID NO: 947 - protein, 118 aa, Homo sapiens
QVQLVQSGAEVKKPGASVKVSCKASGYTFTNDGFVWVRQAPGQVPEWMGWISVHTGDTIYAQRFQGRVTMTTDTSTRTSYMELMSLRSDDTAVYYCARDYGDGPPDHWGQGTLVTVSS

SEQ ID NO: 948 - protein, 124 aa, Homo sapiens
QVQLVQSGPEVKKPGSSVRVSCKVSGGPFSSYGVSWARQAPEKGLEWMGGVLPIFGTVGYVHKFQGRVTITADESTSTVYMALSSLRSEDTAVYYCVLDTTMSHPHNWYGMDVWGHGTTVTVSS

SEQ ID NO: 949 - protein, 125 aa, Homo sapiens
QVQLVQSGAEVKKPGSSMKLSCKASGINFRSYSFSWVRQAPGQGLEWMGGVIPYFPTANYAEKFRGRVTATADESTGTVYLEMSSLRSEDTAVYYCASEYFDGRSYHSFCGLDVWGQGTLVTVSS

SEQ ID NO: 950 - protein, 126 aa, Homo sapiens
QVQLVQSGAEVKKPGSSVKVSCKASGGTLSDYAISWVRQAPGQGLEWMGGIMPVFGSPGYAEIFQGRLTITADESRSTAYMELTSLRSEDTAVYYCARDPSILNTGPHHWYDLDIWGPGTTVTVSS

SEQ ID NO: 951 - protein, 129 aa, Homo sapiens
EVQLVQSGAEVKKPGSSMRVSCRVSGGTFITHAMSWVRQAPGQGPEWMGGIVPLFGRASYAQPSQTRVQITADESTSTVYLEVPSLTSEDTAVYYCVRDSEPYTATRSQNHYWYDMDVWGQGTTVTVSS

SEQ ID NO: 952 - protein, 125 aa, Homo sapiens
EVQLVESGPGLVKPSATLSLTCTVSGGSINNYYWTWVRQSAGKGLEWIGRINTSGSTNYNASLKSRVTMSIDTSKNEFSLRLSSVTAADTAVYYCAREFGVRFLDRSLFGAMDVWGHGATVTVSS

SEQ ID NO: 953 - protein, 119 aa, Homo sapiens
QVQLVESGGGVVQPGRSLRLSCAASGFTFSAFAMHWVRQAPGKGLEWVTIISYDGSNEYYADSVQGRFSISRDNSKNTLFLQMSSLRTEDTAIYYCARAGGYLSAFDIWGQGTTVTVSS

SEQ ID NO: 954 - protein, 126 aa, Homo sapiens
EVQLVQSGAEVKKPGSSVKVSCKVSGGTFSNYAISWLRQAPGQGPEWMGGIIPALSKVGYAGKFQARLTFSADELKTTVYMDLSSLTSEDTAVYYCARDPSFLNAGNHFYYDFDVWGQGTMVTVSS

SEQ ID NO: 955 - protein, 125 aa, Homo sapiens
QVQLQESGPGLVKPSGTLSLTCAVSGGSITSRDWWSWVRQPPGKGLEWIGEVYHSGSTSYNPSLKSRVTISVDKSKNEFSLKLSSVTAADTAVYYCARAGNIVVMPAAQYYFDYWGQGTLVTVSS

SEQ ID NO: 956 - protein, 127 aa, Homo sapiens
EVQLVESGGSVVQPGTSLKLSCAGSAGLTITRYAMHWVRQAPGKGLEWVALVSHDGIHIGYSDSVRGRFTISRDNSRNTLYLQMDGLRPEDTAVYYCVRDDVLQHSRPSGPGYFVSWGQGTLVTVSS

SEQ ID NO: 957 - protein, 125 aa, Homo sapiens
QVQLQESGPGLVKPSETLSLTCTVSGGSMNHYYWSWIRQPPGKGLEGIGYTYYSGSTNYNPSLKSRVTISVDASKNQFSLRLSSVTAADTAVYYCARGSQIDLRGGLGATFFDYWGQGTLVTVSS

SEQ ID NO: 958 - protein, 129 aa, Homo sapiens
QVQLVESGAEVKKPGSSVKISCKISGDTFSTNAISWLRQAPGREPEWMGGIVPLVGPASYAQRPQGRLTITADEFTNTAYLELNSLRSEDTATYYCARDSDPYTATRRHNHYWYAMDVWGQGTTVTVSS

SEQ ID NO: 959 - protein, 117 aa, Homo sapiens
EVQLLESGGGLVQPGGSLRLSCAASGFIFKNEPMNWIRQFPGKGLEWISNIRDNGNDVYYADSVKGRFTVSRDNAKNSLYLQMNSLRDDDTALYYCVRDTDWAFDSWGQGTLVTVSS

SEQ ID NO: 960 - protein, 124 aa, Homo sapiens
QVQLVQSGAEVKKPGASVKVSCKASGYTFSSYDINWVRQATGQGLEWMGWMSPNTGDTGYAHKFQGRVRMTSNTSISTAYMELNSLTSEDTAVYYCARRGNNFGYYYYYTVDVWGQGTTVTVSS

SEQ ID NO: 961 - protein, 127 aa, Homo sapiens
QVQLVQSGADVKKPGASVKVSCKASGYTFTSYYMHWVRQAPGQGLEWLGVIHPSGGSTTFAQKFQGRVTMTRDTSTSTVYMELSSLRSEDTAVYYCARVLAGSSHEWQLTHDAFDIWGQGTTVTVSS

SEQ ID NO: 962 - protein, 127 aa, Homo sapiens
EVQLLESGGGLVQPGGSLRLSCAASGFTFSSYAMSWVRQAPGKGLEWVSGIDGGGGSSYYADSVRGRFTVSRDNSKNMLHLQMNSLRADDTAVYFCAKGDWIRYFDWSLPISFFDYWGQGALVTVSS

SEQ ID NO: 963 - protein, 126 aa, Homo sapiens
EVQLLESGPGLLKPSETLSLTCTVSGDSVSSGNFYWSWVRRPPGKALEWIAYSHYTGGTNSDPSFMGRVTMSIDPSRNQFSLRLTSVAAADTAVYYCARTTSPLTYSGHWPLFDYWGQGSLVTVSS

SEQ ID NO: 964 - protein, 129 aa, Homo sapiens; identical to SEQ ID NO: 919

SEQ ID NO: 965 - protein, 126 aa, Homo sapiens
QVQLVQSGAEVKKPGSSVKVSCKASGGMFTDYAISWVRQAPGQRLEWMGGIMPGLGSPAYAQIFRDRATISADVSTSTAYLELTSLKPEDTAVYYCARDPSILNTGNHHWYDLDIWGQGTTVTVSS

SEQ ID NO: 966 - protein, 126 aa, Homo sapiens
QVQLVQSGAEVKKPGSSVKVSCKASGGMFTDYAISWVRQAPGQRPEWMGGIMPGLGSPAYAQIFRGRATISADLSTSTAYLELTSLKPEDTAVYYCARDPSILNTGNHHWYDLDIWGQGTMVTVSS

SEQ ID NO: 967 - protein, 122 aa, Homo sapiens
QVTLKESGGGLVQPGGSLRLSCAASGFTVNSYGMSWVRQAPGKGLEWVSGFKSRSDRPDYAESVKGRFTISRDTSKNTVYLEMIGLRAEDTATYYCVRMDWMEWMKYYFDSWGQGALVTVSS

SEQ ID NO: 968 - protein, 126 aa, Homo sapiens
QVQLVQSGAEVKKPGSSVKVSCKASGGMISDYAISWVRQAPGQRLEWMGGIMPAFGSPGYAQIFRGRATISADVSTNTAYLELTSLNPDDTAVYYCARDPSILNTGNHHWYDLDMWGQGTMVTVSS

SEQ ID NO: 969 - protein, 127 aa, Homo sapiens
QVQLVESGGSVVQPGTSLKLSCAGSAGLTITRYAMHWVRQAPGKGLEWVALVSHDGIHIGYSDSVRGRFTISRDNSRNTLYLQMDGLRPEDTAVYYCVRDDVLQHSRPSGPGYFVSWGQGTLVTVSS

SEQ ID NO: 970 - protein, 127 aa, Homo sapiens; identical to SEQ ID NO: 796

SEQ ID NO: 971 - protein, 116 aa, Mus musculus
EVKLEESGGGLVQPGGSMKFSCVASGFTFSDYWMNWVRQSPDKGLEWVAEIRLKSNNYATHYAASVKGRFTISRDDSKSSVYLQMNNLRAEDSGIYYCTRSAMDYWGQGTSVTVSS

SEQ ID NO: 972 - protein, 111 aa, Mus musculus
QIQLVQSGPELKKPGETVKISCKASGYTFTDYSMHWVKQAPGKGSKWMGWINTETGEPTYADDFKGRFAFSLETSASTAYLQINNLKNEDTATYFCALRRWGQGTLVTVSS

SEQ ID NO: 973 - protein, 111 aa, Mus musculus
QIQLVQSGPELKKPGETVKISCKASGYTFTDYSMHWVKQAPGKGSKWMGWINTETGEPTYADDFKGRFAFSLETSASTAYLQINNLKNEDTATYFCALRRWGQGTLVTVSA

SEQ ID NO: 974 - protein, 111 aa, Mus musculus; identical to SEQ ID NO: 973

SEQ ID NO: 975 - protein, 120 aa, Mus musculus
EVQLVESGGGLVQPGGSLKLSCAASGFTFSNYGMSWVRQTPDKRLELVATINRNGGSTYYLDSVKVRFTISRDNAKSTLFLQLSSLKSDDTAMYYCARIYDFDEDYFDVWGAGTTVTVSS

SEQ ID NO: 976 - protein, 120 aa, Homo sapiens
EVQLLESGGGLVQPGGSLRLSCAASGFTFRNYAMTWVRQAPGKGLEWVSGISDSGDRTYNADSVKGRFSISRDNSKNTLHLQMNSLRAEDTAVYYCALASGSYFGGANYWGQGTLVTVSS

SEQ ID NO: 977 - protein, 119 aa, Homo sapiens
EVQLVESGGGLVQPGGSLRLSCAASGFTVSSNYMSWVRQAPGRGLEWVSVIYSGGSTFYADSVKGRFTISRDNSKNTLYLQMNSLRPEDTAVYYCATGARFGESPFDYWGQGTLVTVSS

SEQ ID NO: 978 - protein, 119 aa, Homo sapiens
EVQLVESGGGLVQPGGSLRLSCAASGFTVSSNYMSWVRQAPGKGLEWVSVIYSGGSTYYADSVKGRFTISRDNSKNTLYLQMNSLRAEDTAVYYCATGARFGESPFDYWGQGTLVTVSS

SEQ ID NO: 979 - protein, 130 aa, Homo sapiens
QVQLVQSGAEVKKPGSSVKVSCKASGGTFSRYTIIWVRQAPGQGLEWMGRIIPILDIANYAQKFQGRVTITADKSTSTAYMELSSLRSEDTAVYYCAREGGLDYFGSRNSGWTYTWFDPWGQGTLVTVSS

SEQ ID NO: 980 - protein, 128 aa, Homo sapiens
QLQVQESGPGLVKPSETLSLTCTVSGASISSNHYFWGWIRQPPGKGLAWIGSMHYSGSTYYNPSLKSRVTISVDTSKNQLSLKLSSVTAADTAVYYCARGVNYYDRNGYYRNDGFDIRGQGTMVTVSS

SEQ ID NO: 981 - protein, 122 aa, Homo sapiens
EVQLVESGGGLVQPGGSLRLSCAASGFTFSSYSMNWVRQAPGKGLEWVSYISSSSNTRYYTDSVMGRFTISRDNAKNSLFLQMNSLRAEDTAVYYCASSKGFCSGGSCSDYWGQGTLVTVSS

SEQ ID NO: 982 - protein, 124 aa, Homo sapiens
EVQLVESGGHLVQPGRSLRLSCAASGFTFDDYAMHWVRQVPGKGLEWVSGISWNGGILDYADSVKGRFTISRDNAKNSLYLHMRSLRTDDTALYYCAKDLRRQDYYADWYFDLWGRGTLVTVSS

SEQ ID NO: 983 - protein, 128 aa, Homo sapiens; identical to SEQ ID NO: 980

SEQ ID NO: 984 - protein, 124 aa, Homo sapiens
EVQLVESGGHLVQPGRSLRLSCAASGFTFDDYAMHWVRQVPGKGLEWVSGISWNGGILGYADSVKGRFTISRDNAKNSLYLQMRSLRTDDTALYYCAKDLRRQDYYADWYFDLWGRGTLVTVSS

SEQ ID NO: 985 - protein, 128 aa, Homo sapiens; identical to SEQ ID NO: 980

SEQ ID NO: 986 - protein, 118 aa, Homo sapiens
QVQLVQSGSELKKPGASVKISCKASGYIFINYAMNWVRQAPGQGLEWMGWINTNTGNPTYAQDFTGRFVFSLDTSLSTAYLQISSLEAEDTAVYYCAKIGSRNSLGVWGQGTLVTVSA

SEQ ID NO: 987 - protein, 123 aa, Homo sapiens
QMQLVQSGPEVKKPGTSVKVSCKASGFTFTSSAVQWVRQARGQRLEWIGWIVVGSGNTDYAQKFQERVTITRDVSTSTAYMELSSLRSEDTAVYYCAAPRCSGGSCYDGFDIWGQGTMVTVSS

SEQ ID NO: 988 - protein, 121 aa, Lama pacos
QVQLVESGGGLVQAGGSLRLSCAASGFPVANTWMEWYRQAPGKEREWVAAITSYGYRTYYADSVKGRFTISRDNAKNTVYLQMNSLKPEDTAVYYCNVKDEGATTKVYDYWGQGTQVTVSS

SEQ ID NO: 989 - protein, 121 aa, Lama pacos
QVQLVESGGGLVQAGGSLRLSCAASGFPVMYTHMHWYRQAPGKEREWVAAIVSLGEYTTYADSVKGRFTISRDNAKNTVYLQMNSLKPEDTAVYYCNVKDWGAANKYYDYWGQGTQVTVSS

SEQ ID NO: 990 - protein, 121 aa, Lama pacos
QVQLVESGGGLVQAGGSLRLSCAASGFPVEVWRMEWYRQAPGKEREGVAAIESYGHGTRYADSVKGRFTISRDNAKNTVYLQMNSLKPEDTAVYYCNVKDDGQLAYHYDYWGQGTQVTVSS

SEQ ID NO: 991 - protein, 121 aa, Lama pacos
QVQLVESGGGLVQAGGSLRLSCAASGFPVEVWRMEWYRQAPGKEREGVAAIESYGWGTRYADSVKGRFTISRDNAKNTVYLQMNSLKPEDTAVYYCNVKDDGQLAYHYDYWGQGTQVTVSS

SEQ ID NO: 992 - protein, 121 aa, Lama pacos
QVQLVESGGGLVQAGGSLRLSCAASGFPVEVWRMEWYRQAPGKEREGVAAIESYGHGTRYADSVKGRFTISRDNAKNTVYLQMNSLKPEDTAVYYCNVWDDGQLAYHYDYWGQGTQVTVSS

SEQ ID NO: 993 - protein, 121 aa, Lama pacos
QVQLVESGGGLVQAGGSLRLSCAASGFPVEVWRMEWYRQAPGKEREGVAAIESYGHGTRYADSVKGRFTISRDNAKNTVYLQMNSLKPEDTAVYYCNVYDDGQLAYHYDYWGQGTQVTVSS

SEQ ID NO: 994 - protein, 121 aa, Lama pacos
QVQLVESGGGLVQAGGSLRLSCAASGFPVYFSYMAWYRQAPGKEREWVAAINSEGDSTTYADSVKGRFTISRDNAKNTVYLQMNSLKPEDTAVYYCNVKDYGWYNSQYDYWGQGTQVTVSS

SEQ ID NO: 995 - protein, 120 aa, Lama pacos
QVQLVESGGGLVQAGGSLRLSCAASGFPVNAHFMYWYRQAPGKEREWVAAIYSYGRTLYADSVKGRFTISRDNAKNTVYLQMNSLKPEDTAVYYCNVKDYGAASWEYDYWGQGTQVTVSS

SEQ ID NO: 996 - protein, 121 aa, Lama pacos
QVQLVESGGGLVQAGGSLRLSCAASGFPMYAWEMAWYRQAPGKEREWVAAIRSMGVHTHYSDSVKGRFTISRDNAKNTVYLQMNSLKPEDTAVYYCNVKDFGGHQAYYDYWGQGTQVTVSS

SEQ ID NO: 997 - protein, 121 aa, Lama pacos
QVQLVESGGGLVQAGGSLRLSCAASGFPVEDTWMEWYRQAPGKEREWVAAITSWGFKTYYADSVKGRFTISRDNAKNTVYLQMNSLKPEDTAVYYCNVKDEGDTSASYDYWGQGTQVTVSS

SEQ ID NO: 998 - protein, 120 aa, Lama pacos
QVQLVESGGGLVQAGGSLRLSCAASGFPVNSWMEWYRQAPGKEREWVAAITSYGYKTYYADSVKGRFTISRDNAKNTVYLQMNSLKPEDTAVYYCNVKDEGYFSDEYDYWGQGTQVTVSS

SEQ ID NO: 999 - protein, 121 aa, Lama pacos
QVQLVESGGGLVQAGGSLRLSCAASGFPVEWAHMHWYRQAPGKEREWVAAIVSAGHYTVYADSVKGRFTISRDNAKNTVYLQMNSLKPEDTAVYYCNVKDWGSSNQYYDYWGQGTQVTVSS

SEQ ID NO: 1000 - protein, 130 aa, Lama pacos
DVQLQESGGDLVQPGGSLRLSCAASGFTLDYYAIGWFRQAPGKEREGVSCISSSDGSTYYADSVKGRFTSSRDNAKNTVYLQMNSLKPEDTAVYYCAAVPSTYYNGSYYYTCHPGGMDYWGKGTQVTVSS

SEQ ID NO: 1001 - protein, 130 aa, Lama pacos
DVQLQESGGGLVQPGGSLRLSCAVSGFTLDYYAIGWFRQAPGKEREGVSCISSSDGSTYYADSVKGRFTSSRDNAKNTVYLQMNSLKPEDTAVYYCAAVPSTYYSGTYYYNCHPGGMDYWGKGTQVTVSS

SEQ ID NO: 1002 - protein, 130 aa, Lama pacos
DVQLQESGGGLVQPGGSLRLSCAASGLTLDYYTIGWFRQAPGKEREGVSCISSSDDSTYYADSVKGRFTISRDNAKNTVYLQMNSLKPEDTAVYYCATAPGTYYKGSYYPMCHYYGMDYWGKGTQVTVSS

SEQ ID NO: 1003 - protein, 130 aa, Lama pacos
DVQLQESGGGLVQPGGSLRLSCAVSGFTLDYYAIGWFRQAPGKEREGVACISSSDGTTYYADSVKGRFTISRDNAKNTVYLQMNSLKPEDTAVYYCATRPLTYYSGSYYTTCSDYGMDYWGKGTLVTVSS

SEQ ID NO: 1004 - protein, 130 aa, Lama pacos
DVQLQESGGGLVQPGGSLRLSCAASGFTLDYYAIGWFRQAPGKEREGVSCISNSDGSTYYADSVKGRFTTSRDNAKNTVYLQMNSLKPEDTAVYYCAAVPSTYYSGSYYYTCHPGGMDYWGKGTQVTVSS

SEQ ID NO: 1005 - protein, 130 aa, Lama pacos
DVQLQESGGGLVQSGGSLRLSCAASGFTLDYYAIGWFRQAPGKEREGVSCISNSDGSTYYADSVKGRFTTSRDNAKNTVYLQMNSLKPEDTAVYYCAAVPSTYYSGSYYYTCHPGGMDYWGKGTQVTVSS

SEQ ID NO: 1006 - protein, 130 aa, Lama pacos
DVQLQESGGGLVQPGGSLRLSCAASGFTLDYYAIGWFRQAPGKEREGVSCISNSDGSTYYADSVKGRFTTSRDNAKNTVYLQMNSLKPEDTAVYYCAAVPSTYYSGSYYYTCHPGGMDYWGKGTLVTVSS

SEQ ID NO: 1007 - protein, 130 aa, Lama pacos
DVQLQESGGGLVQPGGSLRLSCAASGFTLDYYAIGWFRQAPGKEREGVSCISNSGGSTYYADSVKGRFTTSRDNAKNTVYLQMNSLKPEDTAVYYCAAVPSTYYSGSYYYTCHPGGMDYWGKGTQVTVSS

SEQ ID NO: 1008 - protein, 130 aa, Lama pacos
DVQLQESGGGLVQSGGSLRLSCAASGFTLDYYAIGWFRQAPGKEREGVSCITNSDGSTYYADSVKGRFTTSRDNAKNTVYLQMNSLKPEDTAVYYCASFPSTYYSGSYYYTCHPGGMDYWGKGTQVTVSS

SEQ ID NO: 1009 - protein, 133 aa, Lama pacos
DVQLQESGGGLVQPGGSLRLSCAASGFTLDYYAIGWFRQAPGKEREGVSCISSSDGSTYYADSVKGRFTISRDNAKNTVYLQMNSLKPDDTAVYYCAAALSEGGYTIDGSSWCYHSVYGMDYWGKGTQVTVSS

SEQ ID NO: 1010 - protein, 130 aa, Lama pacos
DVQLQESGGGSVEAGGSLRLSCAASGVTLDYYAIGWFRQAPGKEREGVSCISSSDGSTYYADSVKGRFTTSRDNAKNTVYLQMNSLKPEDTADYYCAAVPSTYYSGTYYYNCHPGAMHYWGKGTQVTVSS

SEQ ID NO: 1011 - protein, 130 aa, Lama pacos [sequence omitted]

SEQ ID NO: 1012 - protein, 130 aa, Lama pacos
DVQLQESGGGLVQPGGSLRLSCAASGLTLDYYAIGWFRQAPGKEREGVSCISSSDGSTYYADSVKGRFTTSRDNAKNTVYLQMNSLKPEDTAVYYCAAVPSTYYSGTYYYTCHPGGMDYWGKGTLVTVSS

SEQ ID NO: 1013 - protein, 127 aa, Homo sapiens
QVQLQESGPGLVKPSETLSLTCTVSGYSISSGYYWGWIRQPPGKGLEWIGSIYHSGSTYYNPSLKTRVTISVDTSKNQFSLKLSSVTAADTAVYYCARAVVGIVVVPAAGRRAFDIWGQGTMVTVSS

SEQ ID NO: 1014 - protein, 127 aa, Homo sapiens [sequence omitted]

SEQ ID NO: 1015 - protein, 114 aa, Lama pacos
QVQLVESGGGLVQAGGSLRLSCAASGFPVRKANMHWYRQAPGKEREWVAAIMSKGEQTVYADSVEGRFTISRDNAKNTVYLQMNSLKPEDTAVYYCRVFVGWHYFGQGTQVTVS

SEQ ID NO: 1016 - protein, 114 aa, Lama pacos
QVQLVESGGGLVQAGGSLRLSCAASGFPVQSHYMRWYRQAPGKEREWVAAIESTGHHTAYADSVKGRFTISRDNAKNTVYLQMNSLKPEDTAVYYCTVYVGYEYHGQGTQVTVS

SEQ ID NO: 1017 - protein, 114 aa, Lama pacos
QVQLVESGGGLVQAGGSLRLSCAASGFPVETENMHWYRQAPGKEREWVAAIYSHGMWTAYADSVKGRFTISRDNTKNTVYLQMNSLKPEDTAVYYCEVEVGKWYFGQGTQVTVS

SEQ ID NO: 1018 - protein, 114 aa, Lama pacos
QVQLVESGGGLVQAGGSLRLSCAASGFPVKASRMYWYRQAPGKEREWVAAIQSFGEVTWYADSVKGRFTISRDNAKNTVYLQMNSLKPEDTAVYYCYVWVGQEYWGQGTQVTVS

SEQ ID NO: 1019 - protein, 114 aa, Lama pacos
QVQLVESGGGLVQAGGSLRLSCAASGFPVYASNMHWYRQAPGKEREWVAAIESQGYMTAYADSVKGRFTISRDNAKNTVYLQMNSLKPEDTAVYYCWVIVGEYYVGQGTQVTVS

SEQ ID NO: 1020 - protein, 114 aa, Lama pacos
QVQLVESGGGLVQAGGSLRLSCAASGFPVQAREMEWYRQAPGKEREWVAAIKSTGTYTAYAYSVKGRFTISRDNAKNTVYLQMNSLKPEDTAVYYCYVYVGSSYIGQGTQVTVS

SEQ ID NO: 1021 - protein, 114 aa, Lama pacos
QVQLVESGGGLVQAGGSLRLSCAASGFPVKNFEMEWYRKAPGKEREWVAAIQSGGVETYYADSVKGRFTISRDNAKNTVYLQMNSLKPEDTAVYYCFVYVGRSYIGQGTQVTVS

SEQ ID NO: 1022 - protein, 115 aa, Lama pacos
QVQLVESGGGLVQAGGSLRLSCAASGFPVAYKTMWWYRQAPGKEREWVAAIESYGIKWTRYADSVKGRFTISRDNAKNTVYLQMNSLKPEDTAVYYCIVWVGAQYHGQGTQVTVS

SEQ ID NO: 1023 - protein, 114 aa, Lama pacos
QVQLVESGGGLVQAGGSLRLSCAASGFPVAGRNMWWYRQAPGKEREWVAAIYSSGTYTEYADSVKGRFTISRDNAKNTVYLQMNSLKPEDTAVYYCHVWVGSLYKGQGTQVTVS

SEQ ID NO: 1024 - protein, 114 aa, Lama pacos
QVQLVESGGGLVQAGGSLRLSCAASGFPVKHARMWWYRQAPGKEREWVAAIDSHGDTTWYADSVKGRFTISRDNAKNTVYLQMNSLKPEDTAVYYCYVYVGASYWGQGTQVTVS

SEQ ID NO: 1025 - protein, 114 aa, Lama pacos
QVQLVESGGGLVQAGGSLRLSCAASGFPVNSHEMTWYRQAPGKEREWVAAIQSTGTVTEYADSVKGRFTISRDNAKNTVYLQMNSLKPEDTAVYYCYVYVGSSYLGQGTQVTVS

SEQ ID NO: 1026 - protein, 115 aa, Lama pacos
QVQLVESGGGLVQAGGSLRLSCATSGFPVYQANMHWYRQAPGKEREWVAAIQSYGDGTHYADSVKGRFTISRDNAKNTVYLQMNSLKPEDTAVYYCRAVYVGMHYFGQGTQVTVS

SEQ ID NO: 1027 - protein, 114 aa, Lama pacos
QVQLVESGGGLVQAGGSLRLSCAASGFPVEQREMEWYRQAPGKEREWVAAIDSNGNYTFYADSVKGRFTISRDNAKNTVYLQMNSLKPEDTAVYYCYVYVGKSYIGQGTQVTVS

SEQ ID NO: 1028 - protein, 114 aa, Lama pacos
QVQLVESGGGLVQAGGSLRLSCAASGFPVKHHWMFWYRQAPGKEREWVAAIKSYGYGTEYADSVKGRFTISRDNAKNTVYLQMNSLKPEDTAVYYCFVGVGTHYAGQGTQVTVS

SEQ ID NO: 1029 - protein, 114 aa, Lama pacos
QVQLVESGGGLVQAGGSLRLSCAASGFPVYAAEMEWYRQAPGKEREWVAAISSQGTITYYADSVKGRFTISRDNAKNTVYLQMNSLKPEDTAVYYCFVYVGKSYIGQGTQVSVS

SEQ ID NO: 1030 - protein, 114 aa, Lama pacos; identical to SEQ ID NO: 1029

SEQ ID NO: 1031 - protein, 120 aa, Lama pacos
QVQLVESGGGLVQAGGSLRLSCAASGFPVHAWEMAWYRQAPGKEREWVAAIRSFGSSTHYADSVKGRFTISRDNAKNTVYLQMNSLKPEDTAVYYCNVKDFGTHHYAYDYWGQGTQVTVS

SEQ ID NO: 1032 - protein, 120 aa, Lama pacos
QVQLVESGGGLVQAGGSLRLSCAASGFPVNTWWMHWYRQAPGKEREWVAAITSWGFRTYYADSVKGRFTISRDNAKNTVYLQMNSLKPEDTAVYYCNVKDKGMAVQWYDYWGQGTQVTVS

SEQ ID NO: 1033 - protein, 120 aa, Lama pacos
QVQLVESGGGLVQAGGSLRLSCAASGFPVYNTWMEWYRQAPGKEREWVAAITSHGYKTYYADSVKGRFTISRDNAKNTVYLQMNSLKPEDTAVYYCNVKDEGDMFTAYDYWGQGTQVTVS

SEQ ID NO: 1034 - protein, 120 aa, Lama pacos
QVQLVESGGGLVQAGGSLRLSCAASGFPVYHSTMFWYRQAPGKEREWVAAIYSSGQHTYYADSVKGRFTISRDNAKNTVYLQMNSLKPEDTAVYYCNVKDSGQWRQEYDYWGQGTQVTVS

SEQ ID NO: 1035 - protein, 119 aa, Lama pacos
QVQLVESGGGLVQAGGSLRLSCAASGFPVEHEMAWYRQAPGKEREWVAAIRSMGRKTLYADSVKGRFTISRDNAKNTVYLQMNSLKPEDTAVYYCNVKDFGYTWHEYDYWGQGTQVTVS

SEQ ID NO: 1036 - protein, 114 aa, Lama pacos
QVQLVESGGGLVQAGGSLRLSCAASGFPVNYKTMWWYRQAPGKEREWVAAIWSYGHTTHYADSVKGRFTISRDNAKNTVYLQMNSLKPEDTAVYYCVVWVGHNYEGQGTQVTVS

SEQ ID NO: 1037 - protein, 120 aa, Lama pacos
QVQLVESGGGLVQAGGSLRLSCAASGFPVTMAWMWWYRQAPGKEREWVAAIRSEGVRTYYADSVKGRFTISRDNAKNTVYLQMNSLKPEDTAVYYCNVKDYGQAHAYYDYWGQGTQVTVS

SEQ ID NO: 1038 - protein, 120 aa, Lama pacos
QVQLVESGGGLVQAGGSLRLSCAASGFPVNSHFMEWYRQAPGKEREWVAAIQHSSGFHTYYADSVKGRFTISRDNAKNTVYLQMNSLKPEDTAVYYCNVKDTGTTEDYDYWGQGTQVTVS

SEQ ID NO: 1039 - protein, 120 aa, Lama pacos
QVQLDESGGGLVQAGGSLRLSCAASGFPVYHAWMEWYRQAPGKEREWVAAITSSGRHTYYADSVKGRFTISRDNAKNTVYLQMNSLKPEDTAVYYCNVKDAGRVYNSYDYWGQGTQVTVS

SEQ ID NO: 1040 - protein, 120 aa, Lama pacos
QVQLVESGGGLVQAGGSLRLSCAASGFPVAHAWMEWYRQAPGKEREWVAAITSYGYKTYYADSVKGRFTISRDNAKNTVYLQMNSLKPEDTAVYYCNVKDTGTYRFYYDYWGQGTQVTVS

SEQ ID NO: 1041 - protein, 119 aa, Lama pacos
QVQLVESGGGLVQAGGSLRLSCAASGFPVWNQTMVWYRQAPGKEREWVAAIWSMGHTYYADSVKGRFTISRDNAKNTVYLQMNSLKPEDTAVYYCNVKDAGVYNRYYDYWGQGTQVTVS

SEQ ID NO: 1042 - protein, 120 aa, Lama pacos
QVQLVESGGGLVQAGGSLRLSCAASGFPVEHYWMEWYRQAPGKEREWVAAITSFGYRTYYADSVKGRFTISRDNAKNTVYLQMNSLKPEDTAVYYCNVKDWGFASHAYDYWGQGIQVTVS

SEQ ID NO: 1043 - protein, 120 aa, Lama pacos
QVQLVESGGGLVQAGGSLRLSCAASGFPEIAWEMAWYRQAPGKEREWVAAIRSFGERTLYADSVKGRFTISRDNAKNTVYLQMNSLKPEDTAVYYCNVKDFGWQHQEYDYWGQGTQVTVS

SEQ ID NO: 1044 - protein, 120 aa, Lama pacos
QVQLVESGGGLVQAGGSLRLSCAASGFPVYHAYMEWYRQAPGKEREWVAAIYSNGEHTYYADSVKGRFTISRDNAKNTVYLQMNSLKPEDTAVYYCNVKDSGSFNQAYDYWGQGTQVTVS

SEQ ID NO: 1045 - protein, 120 aa, Lama pacos
QVQLVESGGGLVQAGGSLRLSCAASGFPVEWSHMHWYRQAPGKEREWVAAIVSKGGYTLYADSVKGRFTISRDNAKNTVYLQMNSLKPEDTAVYYCNVKDYGVHFKRYDYWGQGTQVTVI

SEQ ID NO: 1046 - protein, 120 aa, Lama pacos
QVQLVESGGGLVQAGGSLRLSCAASGFPVFHVWMEWYRQAPGKEREWVAAIDSAGWHTYYADSVKGRFTISRDNAKNTVYLQMNSLKPEDTAVYYCNVKDAGNTTSAYDYWGQGTQVTVS

SEQ ID NO: 1047 - protein, 114 aa, Lama pacos
QVQLVESGGGLVQAGGSLRLSCAASGFPVYAQNMHWYRQAPGKEREWVAAIYSHGYWTLYADSVKGRFTISRDNAKNTVYLQMNSLKPEDTAVYYCEVQVGAWYTGQGTQVTVS

SEQ ID NO: 1048 - protein, 120 aa, Lama pacos
QVQLVESGGGLVQAGGSLRLSCAASGFPVYYNWMEWYRQAPGKEREWVAAIHSNGDETFYADSVKGRFTISRDNAKNTVYLQMNSLKPEDTAVYYCNVKDIDAEAYAYDYWGQGTQVTVS

SEQ ID NO: 1049 - protein, 120 aa, Lama pacos
QVQLVESGGGLVQAGGSLRLSCAASGFPVYHVWMEWYRQAPGKEREWVAAITSSGSHTYYADSVKGRFTISRDNAKNTVYLQMNSLKPEDTAVYYCNVKDSGQWRVQYDYWGQGTQVTVS

SEQ ID NO: 1050 - protein, 120 aa, Lama pacos
QVQLVESGGGLVQAGGSLRLSCAASGFPVYWHHMHWYRQAPGKEREWVAAIISWGWYTTYADSVKGRFTISRDNAKNTVYLQMNSLKPEDTAVYYCNVKDHGAQNQMYDYWGQGTQVTVS

SEQ ID NO: 1051 - protein, 120 aa, Lama pacos
QVQLVESGGGLVQAGGSLRLSCAASGFPVYRDRMAWYRQAPGKEREWVAAIYSAGQQTRYADSVKGRFTISRDNAKNTVYLQMNSLKPEDTAVYYCNVKDVGHHYEYYDYWGQGTQVTVS

SEQ ID NO: 1052 - protein, 120 aa, Lama pacos
QVQLVESGGGLVQAGGSLRLSCAASGFPVDNGYMHWYRQAPGKEREWVAAIDSYGWHTIYADSVKGRFTISRDNAKNTVYLQMNSLKPEDTAVYYCNVKDKGQMRAAYDYWGQGTQVTVS

SEQ ID NO: 1053 - protein, 120 aa, Lama pacos
QVQLVESGGGLVQAGGSLRLSCAASGFPVSWHSMYWYRQAPGKEREWVAAIFSEGDWTYYADSVKGRFTISRDNAKNTVYLQMNSLKPEDTAVYYCNVKDYGSSYYKYDYWGQGTQVTVS

SEQ ID NO: 1054 - protein, 120 aa, Lama pacos
QVQLVESGGGLVQAGGSLRLSCAASGFPVSQSVMAWYRQAPGKEREWVAAIYSKGQYTHYADSVKGRFTISRDNAKNTVYLQMNSLKPEDTAVYYCNVKDAGSSYWDYDYWGQGTQVTVS

SEQ ID NO: 1055 - protein, 124 aa, Lama pacos
QVQLVESGGGSVQAGGSLRLSCAASGSIGQIEYLGWFRQAPGKEREGVAALNTWTGRTYYADSVKGRFTVSLDNAKNTVYLQMNSLKPEDTALYYCAAARWGRTKPLNTYYYSYWGQGTPVTVS

SEQ ID NO: 1056 - protein, 114 aa, Lama pacos
QVQLVESGGGLVQAGGSLRLSCAASGFPVFSGHMHWYRQAPGKEREWVAAILSNGDSTHYADSVKGRFTISRDNAKNTVYLQMNSLKPEDTAVYYCRVHVGAHYFGQGTQVTVS

SEQ ID NO: 1057 - protein, 123 aa, Lama pacos
QVQLVESGGGSVQAGGSLRLSCAASGYIDKIVYLGWFRQAPGKEREGVAALYTLSGHTYYADSVKGRFTVSLDNAKNTVYLQMNSLKPEDTALYYCAAATEGHAHALYRLHYYWGQGTQVTVS

SEQ ID NO: 1058 - protein, 114 aa, Lama pacos
QVQLVESGGGLVQAGGSLRLSCAASGFPVYQGEMHWYRQAPGKEREWVAAIRSTGVQTWYADSVKGRFTISRDNAKNTVYLQMNSLKPEDTAVYYCRVWVGTHYFGQGTQVTVS

SEQ ID NO: 1059 - protein, 124 aa, Lama pacos
QVQLVESGGGSVQAGGSLRLSCAASGNIQRIYYLGWFRQAPGKEREGVAALMTYTGHTYYADSVKGRFTVSLDNAKNTVYLQMNSLKPEDTALYYCAAAYVGAENPLPYSMYGYWGQGTQVTVS

SEQ ID NO: 1060 - protein, 124 aa, Lama pacos
QVQLVESGGGSVQAGGSLRLSCAASGQISHIKYLGWFRQAPGKEREGVAALITRWGQTYYADSVKGRFTVSLDNAKNTVYLQMNSLKPEDTALYYCAAADYGASDPLWFIHYLYWGQGTQVTVS

SEQ ID NO: 1061 - protein, 124 aa, Lama pacos
QVQLVESGGGSVQAGGSLRLSCAASGKIWTIKYLGWFRQAPGKEREGVAALMTRWGYTYYADSVKGRFTVSLDNAKNTVYLQMNSLKPEDTALYYCAAANYGSNFPLAEEDYWYWGQGTQVTVS

SEQ ID NO: 1062 - protein, 125 aa, Lama pacos
QVQLVESGGGSVQAGGSLRLSCAASGNISQIHYLGWFRQAPGKEREGVAALNTDYGYTYYADSVKGRFTVSLDNAKNTVYLQMNSLKPEDTALYYCAAAYYFGDDIPLWWEAYSYWGQGTQVTVS

SEQ ID NO: 1063 - protein, 124 aa, Lama pacos
QVQLVESGGGSVQAGGSLRLSCAASGNISTIEYLGWFRQAPGKEREGVAALYTWHGQTYYADSVKGRFTVSLDNAKNTVYLQMNSLKPEDTALYYCAAARWGRHMPLSATEYSYWGQGTQVTVS

SEQ ID NO: 1064 - protein, 124 aa, Lama pacos
QVQLVESGGGSVQAGGSLRLSCAASGNIESIYYLGWFRQAPGKEREGVAALWTGDGETYYADSVKGRFTVSLDNAKNTVYLQMNSLKPEDTALYYCAAAAWGNSAPLTTYRYYYWGQGTQVTVS

SEQ ID NO: 1065 - protein, 114 aa, Lama pacos
QVQLVESGGGLVQAGGSLRLSCAASGFPVEQGRMYWYRQAPGKEREWVAAIISHGTVTVYADSVKGRFTISRDNAKNTVYLQMNSLKPEDTAVYYCYVYVGAQYWGQGTQVTVS

SEQ ID NO: 1066 - protein, 124 aa, Lama pacos
QVQLVESGGGSVQAGGSLRLSCAASGFIYGITYLGWFRQAPGKEREGVAALVTWNGQTYYADSVKGRFTVSLDNAKNTVYLQMNSLKPEDTALYYCAAADWGYDWPLWDEWYWYWGQGTQVTVS

SEQ ID NO: 1067 - protein, 124 aa, Lama pacos
QVQLVESGGGSVQAGGSLRLSCAASGTIADIKYLGWFRQAPGKEREGVAALMTRWGSTYYADSVKGRFTVSLDNAKNTVYLQMNSLKPEDTALYYCAAANYGANYPLYSQQYSYWGQGTQVTVS

SEQ ID NO: 1068 - protein, 124 aa, Lama pacos
QVQLVESGGGSVQAGGSLRLSCAASGSISSIKYLGWFRQAPGKEREGVAALMTRWGMTYYADSVKGRFTVSLDNAKNTVYLQMNSLKPEDTALYYCAAANYGANEPLQYTHYNYWGQGTQVTVS

SEQ ID NO: 1069 - protein, 124 aa, Lama pacos
QVQLVESGGGSVQAGGSLRLSCAASGEIESIFYLGWFRQAPGKEREGVAALYTYVGQTYYADSVKGRFTVSLDNAKNTVYLQMNSLKPEDTALYYCAAASYGAAHPLSIMRYYYWGQGTQVTVS

SEQ ID NO: 1070 - protein, 124 aa, Lama pacos
QVQLVESGGGSVQAGGSLRLSCAASGTIAHIKYLGWFRQAPGKEREGVAALMTKWGQTYYADSVKGRFTVSLDNAKNTVYLQMNSLKPEDTALYYCAAASYGANFPLKASDYSYWGQGTQVTVS

SEQ ID NO: 1071 - protein, 124 aa, Lama pacos
QVQLVESGGGSVQAGGSLRLSCAASGSIQAITYLGWFRQAPGKEREGVAALVTWNGQTYYADSVKGRFTVSLDNAKNTVYLQMNSLKPEDTALYYCAAADWGYDWPLWDEWYWYWGQGTQVTVS

SEQ ID NO: 1072 - protein, 124 aa, Lama pacos
QVQLVESGGGSVQAGGSLRLSCAASGSISSITYLGWFRQAPGKEREGVAALVTYSGNTYYADSVKGRFTVSLDNAKNTVYLQMNSLKPEDTALYYCAAATWGHSWPLYNDEYWYWGQGSQVTVS

SEQ ID NO: 1073 - protein, 124 aa, Lama pacos
QVQLVESGGGSVQAGGSLRLSCAASGSISSITYLGWFRQAPGKEREGVAALITVNGHTYYADSVKGRFTVSLDNAKNTVYLQMNSLKPEDTALYYCAAAAWGYAWPLHQDDYWYWGQGTQVTVS

SEQ ID NO: 1074 - protein, 124 aa, Lama pacos
QVQLVESGGGSVQAGGSLRLSCAASGSISSITYLGWFRQAPGKEREGVAALNTFNGTTYYADSVKGRFTVSLDNAKNTVYLQMNSLKPEDTALYYCAAATWGYSWPLIAEYNWYWGQGTQVTVS

SEQ ID NO: 1075 - protein, 114 aa, Lama pacos
QVQLVESGGGLVQAGGSLRLSCAASGFPVLFTYMHWYRQAPGKEREWVAAIWSSGNSTWYADSVKGRFTISRDNAKNTVYLQMNSLKPEDTAVYYCFVKVGNWYAGQGTQVTVS

SEQ ID NO: 1076 - protein, 124 aa, Lama pacos
QVQLVESGGGSVQAGGSLRLSCAASGSISSITYLGWFRQAPGKEREGVAALKTQAGFTYYADSVKGRFTVSLDNAKNTVYLQMNSLKPEDTALYYCAAANWGYSWPLYEADDWYWGQGTQVTVS

SEQ ID NO: 1077 - protein, 114 aa, Lama pacos
QVQLVESGGGLVQAGGSLRLSCAASGFPVNAGNMHWYRQAPGKEREWVAAIQSYGRTTYYADSVKGRFTISRDNAKNTVYLQMNSLKPEDTAVYYCRVFVGMHYFGQGTQVTVS

SEQ ID NO: 1078 - protein, 114 aa, Lama pacos
QVQLVESGGGLVQAGGSLRLSCAASGFPVSSSTMTWYRQAPGKEREWVAAINSYGWETHYADSVKGRFTISRDNAKNTVYLQMNSLKPEDTAVYYCYVYVGGSYIGQGTQVTVS

SEQ ID NO: 1079 - protein, 125 aa, Lama pacos
QVQLVESGGGSVQAGGSLRLSCAASGSISSITYLGWFRQAPGKEREGVAALVTSDGRTYYADSVKGRFTVSLDNAKNTVYLQMNSLKPEDTALYYCAAANWGYSWPLYQTEYWYWGQGTQVTVSS

SEQ ID NO: 1080 - protein, 115 aa, Lama pacos
QVQLVESGGGLVQAGGSLRLSCAASGFPVQLYWMEWYRQAPGKEREWVAAITSDGDYTEYADSVKGRFTISRDNAKNTVYLQMNSLKPEDTAVYYCYVKVGEWYYGQGTQVTVSS

SEQ ID NO: 1081 - protein, 115 aa, Lama pacos
QVQLVESGGGLVQAGGSLRLSCAASGFPVENYYMRWYRQAPGKEREWVAAIESSGAETRYADSVKGRFTISRDNAKNTVYLQMNSLKPEDTAVYYCYVVVGWGYAGQGTQVTVSS

SEQ ID NO: 1082 - protein, 115 aa, Lama pacos
QVQLVESGGGLVQAGGSLRLSCAASGFPVYEHYMRWYRQAPGKEREWVAAIQSHGNHTAYADSVKGRFTISRDNAKNTVYLQMNSLKPEDTAVYYCFVVVGNGYTGQGTQVTVSS

SEQ ID NO: 1083 - protein, 115 aa, Lama pacos
QVQLVESGGGLVRAGGSLRLSCAASGFPVASQEMTWYRQAPGKEREWVAAISSSGRQTEYADSVKGRFTISRDNAKNTVYLQMNSLKPEDTAVYYCYVYVGGSYIGQGTQVTVSS

SEQ ID NO: 1084 - protein, 115 aa, Lama pacos
QVQLVESGGGLVQAGGSLRLSCAASGFPVKASEMEWYRQAPGKEREWVAAIASIGYNTYYADSVKGRFTISRDNAKNTVYLQMNSLKPEDTAVYYCLVYVGATYIGQGTQVTVSS

SEQ ID NO: 1085 - protein, 115 aa, Lama pacos
QVQLVESGGGLVQAGGSLRLSCAASGFPVSNEEMTWYRQAPGKEREWVAAIASNGNQTEYADSVKGRFTISRDNAKNTVYLQMNSLKPEDTAVYYCYVYVGASYIGQGTQVTVSS

SEQ ID NO: 1086 - protein, 115 aa, Lama pacos
QVQLVESGGGLVQAGGSLRLSCAASGFPVKESEMTWYRQARGKEREWVAAINSHGMTTHYADSVKGRFTISRDNAKNTVYLQMNSLKPEDTAVYYCYVYVGGSYIGQGTQVTVSS

SEQ ID NO: 1087 - protein, 116 aa, Lama pacos
QVQLVESGGGLVQAGGSLRLSCAASGFPVNHYEMEWYRQAPGREREWVAAIMDSTGYETAYADSVKGRFTISRDNAKNTVYLQMNSLKPEDTAVYYCYVYVGASYIGQGTQVTVSS

SEQ ID NO: 1088 - protein, 115 aa, Lama pacos
QVQLVESGGGLVQAGGSLRLSCAASGFPVESENMHWYRQAPGKEREWVAAIYSTGGWTLYADSVKGRFTISRDNAKNTVYLQMNSLKPEDTAVYYCAVQVGYWYEGQGTQVTVSS

SEQ ID NO: 1089 - protein, 115 aa, Lama pacos
QVQLVESGGGLVQAGGSLRLSCAASGFPVESTEMTWYRQAPGKEREWVAAIESEGHGTEYADSVKGRFTISRDNAKNTVYLQMNSLKPEDTAVYYCYVYVGAGYIGQGTQVTVSS

SEQ ID NO: 1090 - protein, 115 aa, Lama pacos
QVQLVESGGGLVQAGGSLRLSCAASGFPVKASEMVWYRQAPGKEREWVAAILSQGHATEYADSVKGRFTISRDNAKNTVYLQMNSLKPEDTAVYYCYVWVGRSYIGQGTQVTVSS

SEQ ID NO: 1091 - protein, 115 aa, Lama pacos
QVQLVESGGGLVQAGGSLRLSCAASGFPVYSAEMEWYRQAPGKEREWVAAISSYGTNTYYADSVKGRFTISRDNAKNTVYLQMNSLKPEDTAVYYCYVYVGSSYIGQGTQVTVSS

SEQ ID NO: 1092 - protein, 115 aa, Lama pacos
QVQLVESGGGLVQAGGSLRLSCAASGFPVWYKEMEWYRQAPGKEREWVAAITSAGHHTYYADSVKGRFTISRDNAKNTVYLQMNSLKPEDTAVYYCYVYVGESYIGQGTQVTVSS

SEQ ID NO: 1093 - protein, 115 aa, Lama pacos
QVQLVESGGGLVQAGGSLRLSCAASGFPVAHKSMWWYRQAPGKEREWVAAIESTGDTTRYADSVKGRFTISRDNAKNTVYLQMNSLKPEDTAVYYCVVWVGEVYRGQGTQVTVSS

SEQ ID NO: 1094 - protein, 121 aa, Lama pacos
QVQLVESGGGLVQAGGSLRLSCAASGFPVYNTWMEWYRQAPGKEREWVAAITSYGFHTYYADSVKGRFTISRDNAKNTVYLQMNSLKPEDTAVYYCNVKDEGNTTAYYDYWGQGTQVTVSS

SEQ ID NO: 1095 - protein, 121 aa, Lama pacos
QVQLVESGGGLVQAGGSLRLSCAASGFPVYWAHMTWYRQAPGKEREWVAAIVSSGAYTAYADSVKGRFTISRDNAKNTVYLQMNSLKPEDTAVYYCNVKDFGTQEHYYDYWGQGTQVTVSS

SEQ ID NO: 1096 - protein, 121 aa, Lama pacos
QVQLVESGGGPVQAGGSLRLSCAASGFPVMWSHMHWYRQAPGKEREWVAAIVSYGAYTIYADSVKGRFTISRDNAKNTVYLQMNSLKPEDTAVYYCNVKDFGGYRYYYDYWGQGTQVTVSS

SEQ ID NO: 1097 - protein, 121 aa, Lama pacos
QVQLVESGGGLVQAGGSLRLSCAASGFPVQGTWMEWYRQAPGKEREWVAAITSVGYRTYYADSVKGRFTISRDNAKNTVYLQMNSLKPEDTAVYYCNVKDEGAIAKNYDYWGQGTQVTVSS

SEQ ID NO: 1098 - protein, 121 aa, Lama pacos
QVQLVESGGGLVQAGGSLRLSCAASGFPVYNTWMEWYRQAPGKEREWVAAITSWGFKTYYADSVKGRFTISRDNAKNTVYLQMNSLKPEDTAVYYCNVKDEGYTGYYYDYWGQGTQVTVSS

SEQ ID NO: 1099 - protein, 121 aa, Lama pacos
QVQLVESGGGLVQAGGSLRLSCAASGFPVEWTHMHWYRQAPGKEREWVAAIASSGAYTVYADSVKGRFTISRDNAKNTVYLQMNSLKPEDTAVYYCNVKDWGSQDRYYDYWGQGTQVTVSS

SEQ ID NO: 1100 - protein, 121 aa, Lama pacos
QVQLVESGGGLVQAGGSLRLSCAASGFPVAGTWMEWYRQAPGKEREWVAAITSYGYRTYYADSVKGRFTISRDNAKNTVYLQMNSLKPEDTAVYYCNVKDEGKSSQVYDYWGQGTQVTVSS

SEQ ID NO: 1101 - protein, 121 aa, Lama pacos
QVQLVESGGGLVQAGGSLRLSCAASGFPVNYTIMFWYRKAPGKEREWVAAIKSHGATTLYADSVKGRFTISRDNAKNTVYLQMNSLKPEDTAVYYCNVKDVGNDQKSYDYWGQGTQVTVSS

SEQ ID NO: 1102 - protein, 121 aa, Lama pacos
QVQLVESGGGLVQAGGSLRLSCAASGFPVVWAHMHWYRQAPGKEREWVAAITSEGAHTIYADSVKGRFTISRDNAKNTVYLQMNSLKPEDTAVYYCNVKDWGTYSTYYDYWGQGTQVTVSS

SEQ ID NO: 1103 - protein, 115 aa, Lama pacos
QVQLVESGGGLVQAGGSLRLSCAASGFPVAQQEMTWYRQAPGKEREWVAAISSIGSITHYADSVKGRFTISRDNAKNTVYLQMNSLKPEDTAVYYCYVYVGASYIGQGTQVTVSS

SEQ ID NO: 1104 - protein, 121 aa, Lama pacos
QVQLVESGGGLVQAGGSLRLSCAASGFPVQYEHMHWYRQAPGKEREWVAAIVSEGAYTHYADSVKGRFTISRDNAKNTVYLQMNSLKPEDTAVYYCNVKDWGWLAQYYDYWGQGTQVTVSS

SEQ ID NO: 1105 - protein, 121 aa, Lama pacos
QVQLVESGGGLVQAGGSLRLSCAASGFPVNYNWMEWYRQAPGKEREWVAAITSWGYKTYYADSVKGRFTISRDNAKNTVYLQMNSLKPEDTAVYYCNVKDEGMWQHYYDYWGQGTQVTVSS

SEQ ID NO: 1106 - protein, 121 aa, Lama pacos
QVQLVESGGGLVQAGGSLRLSCAASGFPVWNTWMEWYRQAPGKEREWVAAITSYGFKTYYADSVKGRFTISRDNAKNTVYLQMNSLKPEDTAVYYCNVKDEGNSQSHYDYWGQGTQVTVSS

SEQ ID NO: 1107 - protein, 121 aa, Lama pacos
QVQLVESGGGLVQAGGSLRLSCAASGFPVEMWSMEWYRQAPGKEREWVAAIMSFGYQTWYADSVKGRFTISRDNAKNTVYLQMNSLKPEDTAVYYCNVKDAGNSKALYDYWGQGTQVTVSS

SEQ ID NO: 1108 - protein, 121 aa, Lama pacos
QVQLVESGGGLVQAGGSLRLSCAASGFPVEHDHMHWYRQAPGKEREWVAAIVSQGAYTVYADSVKGRFTISRDNAKNTVYLQMNSLKPEDTAVYYCNVKDWGRAGARYDYWGQGTQVTVSS

SEQ ID NO: 1109 - protein, 121 aa, Lama pacos
QVQLVESGGGLVQAGGSLRLSCAASGFPVDAAWMEWYRQAPGKEREWVAAITSYGYRTYYADSVKGRFTISRDNAKNTVYLQMNSLKPEDTAVYYCNVKDMDRWRTTYDYWGQGTQVTVSS

SEQ ID NO: 1110 - protein, 115 aa, Lama pacos
QVQLVESGGGLVQAGGSLRLSCAASGFPVNHTRMYWYRQAPGKEREWVAAIQSHGQNTFYADSVKGRFTISRDNAKNTVYLQMNSLKPEDTAVYYCYVWVGNQYWGQGTQVTVSS

SEQ ID NO: 1111 - protein, 121 aa, Lama pacos
QVQLVESGGGLVQAGGSLRLSCAASGFPVVAWQMTWYRQAPGKEREWVAAIRSFGVSTHYADSVKGRFTISRDNAKNTVYLQMNSLKPEDTAVYYCNVKDWGYEYEGYDYWGQGTQVTVSS

SEQ ID NO: 1112 - protein, 121 aa, Lama pacos
QVQLVESGGGLVQAGGSLRLSCAASGFPVQHEWMEWYRQAPGKEREWVAAITSYGYRTYYADSVKGRFTISRDNAKNTVYLQMNSLKPEDTAVYYCNVKDTGTYQAWYDYWGQGTQVTVSS

SEQ ID NO: 1113 - protein, 121 aa, Lama pacos
QVQLVESGGGLVQAGGSLRLSCAASGFPVEQEHMYWYRQASGKEREWVAAIVSEGAYTAYADSVKGRFTISRDNAKNTVYLQMNSLKPEDTAVYYCNVKDWGGYQWYYDYWGQGTQVTVSS

SEQ ID NO: 1114 - protein, 121 aa, Lama pacos
QVQLVESGGGLVQAGGSLRLSCAASGFPVNAEIMFWYRQAPGKEREWVAAIKSAGTTTLYADSVKGRFTISRDNAKNTVYLQMNSLKPEDTAVYYCNVKDYGAQAHYYDYWGQGTQVTVSS

SEQ ID NO: 1115 - protein, 121 aa, Lama pacos
QVQLVESGGGLVQAGGSLRLSCAASGFPVMWAHMAWYRQAPGKEREWVAAIVSAGAYTHYADSVKGRFTISRDNAKNTVYLQMNSLKPEDTAVYYCNVKDWGTYNSYYDYWGQGTQVTVSS

SEQ ID NO: 1116 - protein, 115 aa, Lama pacos
QVQLVESGGGLVQAGGSLRLSCAASGFPVNAEEMEWYRQAPGKEREWVAAISSSGDWTYYADSVKGRFTISRDNAKNTVYLQMNSLKPEDTAVYYCLVYVGSTYIGQGTQVTVSS

SEQ ID NO: 1117 - protein, 125 aa, Lama pacos
QVQLVESGGGSVQAGGSLRLSCAASGNIQHIKYLGWFRQAPGREREGVAALMTRYGQTYYADSVKGRFTVSLDNAKNTVYLQMNSLKPEDTALYYCAAAHYGDNFPLAYQAYLYWGQGTQVTVSS

SEQ ID NO: 1118 - protein, 125 aa, Lama pacos
QVQLVESGGGSVQAGGSLRLSCAASGYINQIYYLGWFRQAPGKEREGVAALNTYQGQTYYADSVKGRFTVSLDNAKNTVYLQMNSLKPEDTALYYCAAARWGRDEPLYHYYYSYWGQGTQVTVSS

SEQ ID NO: 1119 - protein, 121 aa, Lama pacos
QVQLVESGGGLVQAGGSLRLSCAASSFPVDTYHMAWYRQAPGKEREWVAAIVSWGWRTYYADSVKGRFTISRDNAKNTVYLQMNSLKPEDTAVYYCNVKDIGAQEVHYDYWGQGTQVTVSS

SEQ ID NO: 1120 - protein, 125 aa, Lama pacos
QVQLVESGGGSVQAGGSLRLSCAASGYIKSIKYLGWFRQAPGKEREGVAALMTRYGETYYADSVKGRFTVSLDNAKNTVYLQMNSLKPEDTALYYCAAANYGNNWPLTGVNYWYWGQGTQVTVSS

SEQ ID NO: 1121 - protein, 115 aa, Lama pacos
QVQLVESGGGLVQAGGSLRLSCAASGFPVKSYEMEWYRQAPGKEREWVAAISSYGEYTEYADSVKGRFTISRDNAKNTVYLQMNSLKPEDTAVYYCYVWVGDSYLGQGTQVTVSS

SEQ ID NO: 1122 - protein, 125 aa, Lama pacos
QVQLVESGGGSVQAGGSLRLSCAASGGITHIVYLGWFRQAPGKEREGVAALMTRWGTTYYADSVKGRFTVSLDNAKNTVYLQMNSLKPEDTALYYCAAAKYGQNFPLSYHAYRYWGQGTQVTVSS

SEQ ID NO: 1123 - protein, 125 aa, Lama pacos
QVQLVESGGGSVQAGGSLRLSCAASGYIKHIEYLGWFRQAPGKEREGVAALKTSSGSTYYADSVKGRFTVSLDNAKNTVYLQMNSLKPEDTALYYCAAARYGRSDPLHYHEYSYWGQGTQVTVSS

SEQ ID NO: 1124 - protein, 125 aa, Lama pacos
QVQLVESGGGSVQAGGSLRLSCAASGSISSITYLGWFRQAPGKEREGVAALVTSRGKTYYADSVKGRFTVSLDNAKNTVYLQMNSLKPEDTALYYCAAASWGYTWPLYTYDYWYWGQGTQVTVSS

SEQ ID NO: 1125 - protein, 121 aa, Lama pacos
QVQLVESGGGLVQAGGSLRLSCAASGFPVWAHHMLWYRQAPGKEREWVAAIASWGANTAYADSVKGRFTISRDNAKNTVYLQMNSLKPEDTAVYYCNVKDSGQYRENYDYWGQGTQVTVSS

SEQ ID NO: 1126 - protein, 115 aa, Lama pacos
QVQLVESGGGLVQAGGSLRLSCAASGFPVGQQHMYWYRQAPGKEREWVAAIYSYGHITKYADSVKGRFTISRDNAKNTVYLQMNSLKPEDTAVYYCWVYVGDYYEGQGTQVTVSS

SEQ ID NO: 1127 - protein, 125 aa, Lama pacos
QVQLVESGGGSVQAGGSLRLSCAASGAINQIYYLGWFRQAPGKEREGVAALSTKYGETYYADSVKGRFTVSLDNAKNTVYLQMNSLKPEDTALYYCAAARWGRQYPLTFVYYSYWGQGTQVTVSS

SEQ ID NO: 1128 - protein, 125 aa, Lama pacos
QVQLVESGGGSVQAGGSLRLSCAASGHIAQIEYLGWFRQAPGKEREGVAALSTNQGYTYYADSVKGRFTVSLDNAKNTVYLQMNSLKPEDTALYYCAAARWGRTYPLSYMAYTYWGQGTQVTVSS

SEQ ID NO: 1129 - protein, 125 aa, Lama pacos
QVQLVESGGGSVQAGGSLRLSCAASGYITMIEYLGWFRQAPGKEREGVAALNTHTGGTYYADSVKGRFTVSLDNAKNTVYLQMNSLKPEDTALYYCAAARWGRYEPLHYAYYSYWGQGTQVTVSS

SEQ ID NO: 1130 - protein, 125 aa, Lama pacos
QVQLVESGGGSVQAGGSLRLSCAASGNIYNIKYLGWFRQAPGKEREGVAALMTRYGETYYADSVKGRFTVSLDNAKNTVYLQMNSLKPEDTALYYCAAASYGANWPLVSAAYTYWGQGTQVTVSS

SEQ ID NO: 1131 - protein, 126 aa, Lama pacos
QVQLVESGGGSVQAGGSLRLSCAASGAISTIEYLGWFRQAPGREREGVAALYTERGYTYYADSVKGRFTVSLDNAKNTVYLQMNSLKPEDTALYYCAAARYGHAQAPLHYFWYGYWGQGTQVTVSS

SEQ ID NO: 1132 - protein, 115 aa, Lama pacos
QVQLVESGGGLVQAGGSLRLSCAASGFPVAAYEMEWYRQAPGKEREWVAAINSMGDQTYYADSVKGRFTISRDNAKNTVYLQMNSLKPEDTAVYYCYVYVGFSYIGQGTQVTVSS

SEQ ID NO: 1133 - protein, 115 aa, Lama pacos
QVQLVESGGGLVQAGGSLRLSCAASGFPVDYMEMEWFRQAPGKEREWVAAITSNGRETYYADSVKGRFTVSRDNAKNTVYLQMNSLKPEDTAVYYCYVYVGSSYIGQGTQVTVSS

SEQ ID NO: 1134 - protein, 115 aa, Lama pacos
QVQLVESGGGLVQAGGSLRLSCAASGFPVWFQEMEWYRQAPGKEREWVAAISSQGTHTYYADSVKGRFTISRDNAKNTVYLQMNSLKPEDTAVYYCYVYVGASYLGQGTQVTVSS

SEQ ID NO: 1135 - protein, 115 aa, Lama pacos
QVQLVESGGGLVQAGGSLRLSCAASGFPVWQGEMAWYRQAPGKEREWVAAISSMGYKTYYADSVKGRFTISRDNAKNTVYLQMNSLKPEDTAVYYCAVMVGFWYAGQGTQVTVSS

SEQ ID NO: 1136 - protein, 117 aa, Lama pacos
QVQLVESGGGLVQAGGSLRLSCAAGGFPVKDHEMEWYRQAPGKEREWVAAITSSGWGTNTYYADSVKGRFTISRDNAKNTVYLQMNSLKPEDTAVYYCYVYVGSSYIGQGTQVTVSS

SEQ ID NO: 1137 - protein, 115 aa, Lama pacos
QVQLVESGGGLVQAGGSLRLSCAASGFPVNQEEMEWYRQAPGKEREWVAAIKSWGTLTAYADSVKGRFTISRDNAKNTVYLQMNSLKPEDTAVYYCAVHVGQTYIGQGTQVTVSS

SEQ ID NO: 1138 - protein, 115 aa, Lama pacos
QVQLVESGGGLVQAGGSLRLSCAASGFPVYSWNMWWYRQAPGKEREWVAAIESHGDSTRYADSVKGRFTISRDNAKNTVYLQMNSLKPEDTAVYYCYVWVGHTYYGQGTQVTVSS

SEQ ID NO: 1139 - protein, 115 aa, Lama pacos
QVQLVESGGGLVQAGGSLRLRCAASGFPVETTEMEWYRQAPGKEREWVAAISSYGSETYYADSVKGRFTISRDNAKNTVYLQMNSLKPEDTAVYYCYVYVGTSYLGQGTQVTVSS

SEQ ID NO: 1140 - protein, 114 aa, Lama pacos
QVQLVESGGGLVQAGGSLRLSCAASGFPVWSNEMEWYRQAPGKEREWVAAITSYGTTEYADSVKGRFTISRDNAKNTVYLQMNSLKPEDTAVYYCYVYVGYSYIGQGTQVTVSS

SEQ ID NO: 1141 - protein, 118 aa, Lama pacos
QVQLVETGGGLVQPGGSLRLSCAASGFTFSSVYMNWVRQAPGKGPEWVSRISPNSGNIGYTDSVKGRFTISRDNAKNTLYLQMNNLKPEDTALYYCAIGLNLSSSSVRGQGTQVTVSS

SEQ ID NO: 1142 - protein, 125 aa, Lama pacos
QVQLQESGGGLVQAGGSLRLSCAASGRTFSEYAMGWFRQAPGKEREFVATISWSGGSTYYTDSVKGRFTISRDNAKNTVYLQMNSLKPDDTAVYYCAAAGLGTVVSEWDYDYDYWGQGTQVTVSS

SEQ ID NO: 1143 - protein, 119 aa, Lama pacos
QVQLVESGGGLVQPGESLRLSCAASGNIFGIAAVHWFRKAPGKEREFTAGFGSDGSTNYANSVKGRFTISRDNAKNTTYLQMNSLKPEDTAVYYCHALIKNELGFLDYWGPGTQVTVSS

SEQ ID NO: 1144 - protein, 119 aa, Lama pacos [sequence omitted]

SEQ ID NO: 1145 - protein, 112 aa, Homo sapiens
EIVMTQSHTLLPVTPGEPASITCRSSQSLLHSNGYNYLDWYLQKPGQSPQLLIYLGSNRASGVPDRFSGSGSGTDFTLKISRVEAEDVGVYYCMQALQTPQTFGQGTKVDIK

SEQ ID NO: 1146 - protein, 108 aa, Homo sapiens
DIVMTQSPATLSVSPEERATLSCRASQSVSSNLAWYQQKPGQAPRLLIYGASTRATGIPARFSGSGSGTEFTLTISSLQSEDFAVYYCQQYNKWPPWTFGQGTKVDIK

SEQ ID NO: 1147 - protein, 113 aa, Homo sapiens
EIVLTQSPDSLAVSLGERATINCRSSQSVLYSSNNKNYLAWYQQKPGQPPKVLIYWASTRESGVPDRFSGSGSGTDFTLTISSLQAEDVAVYYCQQYYSSPYAFGPGTKVDIK

SEQ ID NO: 1148 - protein, 113 aa, Homo sapiens
EIVLTQSPDSLAVSLGERATINCKSSQSVLYSSNNKNYLAWYQQKPGQPPKLLIYWASTRESGVPDRFSGSGSGTDFTLTISSLQAEDVAVYYCHQYYNTPRTFGQGTKVEIK

SEQ ID NO: 1149 - protein, 107 aa, Homo sapiens
DIVMTQSPATLSLSPGERATLSCRASQSVSSYLAWYQQKPGQAPRLLIYDASNRATGIPARFSGSGSGADFTLTISSLEPEDFAVYYCRQRSNWPPTFGGGTKVDIK

SEQ ID NO: 1150 - protein, 107 aa, Homo sapiens
DIVMTQSPSSLSASVGDRVTITCRASQSISSYLNWYQQEPGKAPKLLIYAASSLQSGVPSRFSGSGSGTDFTLTISSLQPEDFATYYCQQSYSTPPTFGQGTKVDIK

SEQ ID NO: 1151 - protein, 107 aa, Homo sapiens
DIQMTHSLILLSASVGDRVTITCRASQSISSYLNWYQQKPGKAPKLLIYAASSLQSGVPSRFSGSGSGADFTLTISSLQPEDFATYYCQQTYRPPWTFGQGTKVDIK

SEQ ID NO: 1152 - protein, 112 aa, Homo sapiens
EIVVTQSLLSLPVTPGEPASISCRSSQSLLHSNGYNYLDWYLQKPGQSPQVLIYLGSNRASGVPDRFSGSGSGTDFTLKISRVEAEDVGVYYCMQTLQTPYTFGQGTKVEIK

SEQ ID NO: 1153 - protein, 107 aa, Homo sapiens
DIQMTQSPSSLSASVGDRVTITCQASQDISNYLNWYQQKPGKAPKLLIYDASNLETGVPSRFSGSGSGTDFTFTISSLQPEDIATYYCQQYDNLPLTFGGGTKVEIK

SEQ ID NO: 1154 - protein, 112 aa, Homo sapiens
EIVMTQSPLSSPVTLGQPASISCRSSQSLVHSDGNTYLSWLQQRPGQPPRLLIYKISNRFSGVPDRFSGSGAGTDFTLKISRVEAEDVGVYYCMQATQFPYTFGQGTKVDIK

SEQ ID NO: 1155 - protein, 113 aa, Homo sapiens
DIVMTHSLRLLAVSLGERATINCKSSQSVLYSSNNKNYLAWYQQKPGQPPKLLIYWASTRESGVPDRFSGSGSGTDFTLTISSLQAEDVAVYYCQQYYSTYGSFGGGTKVDIK

SEQ ID NO: 1156 - protein, 110 aa, Homo sapiens
QAVVTQPPSVSAAPGQKVTISCSGSSSNIGNNYVSWYQQLPGTAPKLLIYDNNKRPSGIPDRFSGSKSGTSATLGITGLQTGDEADYYCGTWDSSLSVVVFGGGTKLTVL

SEQ ID NO: 1157 - protein, 110 aa, Homo sapiens
QAVVTQPPSASGTPGQRVTISCSGSSSNIGSNTVNWYQQLPGTAPKLLIYSNNQRPSGVPDRFSGSKSGTSASLAISGLQSEDEADYYCAAWDDSLNGVVFGGGTKLTVL

SEQ ID NO: 1158 - protein, 107 aa, Homo sapiens
DIQLTQSPSSLSASVRNRVTITCRASQGIKNDLCWYQQKPGKAPKRLIYAASSLQSGVPSRFSGSGSGTEFTLTISSLQPEDFATYYCLQHNNYPLTFGGGTNEEIK

SEQ ID NO: 1159 - protein, 109 aa, Mus musculus
QAVVTQESALTTSPGETVTLTCRSSTGAVTTSNYANWVQEKPDHLFTGLIGGTNNRAPGVPARFSGSLIGDKAALTITGAQTEDEAIYFCALWYSNHWVFGGGTKLTVL

SEQ ID NO: 1160 - protein, 107 aa, Mus musculus
DIQMTQSPSSLSASLGDRVTISCRASQDISNYLNWYQQKPDGTVKLLIFYTSRLHSGVPSRFSGSGSGTDYSLTISNLEQEDIATYFCQQGNTLPYTFGGGTKLEIK

SEQ ID NO: 1161 - protein, 106 aa, Mus musculus
DIKMTQSPSSMYASLGERVTITCKASQDINSFLSWFQQKPGKSPKTLIYRANRLVDGVPSRFSGSGSGQDYSLTISSLDYEDMGIYYCLQYDEFRTFGGGTKLEIK

SEQ ID NO: 1162 - protein, 109 aa, Mus musculus
QAVVTQESALTTSPGETVTLTCRSSTGAVTTSNYANWVQEKPDHLITGLIGGTNNRVPGVPARFSGSLIGDKAALTITGAQTEDEAIYFCALWYSNQFIFGSGTKVTVL

SEQ ID NO: 1163 - protein, 109 aa, Mus musculus; identical to SEQ ID NO: 1159

SEQ ID NO: 1164 - protein, 111 aa, Mus musculus
DIVLTQSPASLAVSLGQRATISCRASESVDSYGTSFMHWYQQKPGQPPKLLIYLASNLESGVPARFSGSGSRTDFTLTIDPVEADDAATYYCQQNNEDPLTFGAGTKLELK

SEQ ID NO: 1165 - protein, 112 aa, Mus musculus
DVVMTQTPLSLPVSLGDQASISCRSSQSIVHSNGNTYLEWYLQKPGQSPKLLIYKVSNRFSGVPDRFSGSGSGTDFTLKISRVEAEDLGVYYCFQGSHVPPTFGGGTKLEIK

SEQ ID NO: 1166 - protein, 111 aa, Mus musculus
DIVLTQSPASLAVSLGQRATISCRASEGVDSYGSSFMHWYQQKPGQPPKLLIYLASNLESGVPARFSGSGSGTDFTLTIDPVEADDAATYYCQQNNEDPLTFGAGTKLELK

SEQ ID NO: 1167 - protein, 106 aa, Mus musculus
DIKMTQSPSSMYASLGERVTITCKASQDINSFLSWFQQKPGKSPKTLIYRANRLVDGVPSRFSGSGSGQDYSLTISSLEYEDMGIYYCLQYDEFRTFGGGTKLEIK

SEQ ID NO: 1168 - protein, 109 aa, Mus musculus
QAVVTQESALTTSPGETVTLTCRSSTGAVTTSNYANWVQEKPDHLITGLIGGTNNRVPGVPARFSGSLIGDKAALTITGAQTEDKAIYFCALWYSNQFIFGSGTKVTVL

SEQ ID NO: 1169 - protein, 111 aa, Mus musculus
DIVLTQSPASLAVSLGQRATISCRASEGVDSYGSSFMHWYQQKPGQAPKLLIYLASNLESGVPARFSGSGSRTDFTLTIDPVEADDAAIYYCQQNNEDPLTFGAGTKLEIK

SEQ ID NO: 1170 - protein, 111 aa, Mus musculus
DIVLTQSPASLAVSLGQRATISCRASESVEYYGTSLMQWFQQKPGQPPKLLIFAASNVESGVPARFGGSGSGTDFSLNIHPVEEDDIAMYFCQQSRKVPWTFGGGTKLEIK

SEQ ID NO: 1171 - protein, 106 aa, Mus musculus
QIVLTQSPAIMSASPGEKVTMTCSASSSVSYMHWYQQKSGTSPKRWIYDTSKLASGVPARFSGSGSGTSYSLTISSMEAEDAATYYCQQWSSNPPTFGSGTKLEIK

SEQ ID NO: 1172 - protein, 111 aa, Mus musculus
DIVLTQSPASLAVSLGQRATISCRASESVEYYGTSLMQWFQQKPGQPPKLLIFAASNVESGVPARFGGSGSGTDFSLNIHPVEEDDIATYFCQQSRKVPWTFGGGTKLEIK

SEQ ID NO: 1173 - protein, 109 aa, Mus musculus; identical to SEQ ID NO: 1159

SEQ ID NO: 1174 - protein, 110 aa, Mus musculus
QAVVTQPPSASGTPGQRVTISCSGSSSNIGSNYVYWYQQLPGTAPKLLIYNNNQRPSGVPDRFSGSKSGTSASLAISGLRSEDEADYYCAAWDDSLIYVLFGGGTKLTVL

SEQ ID NO: 1175 - protein, 109 aa, Mus musculus
QAVVTQESALTTSPGETVTLTCRSSTGAVTTSNYANWVQEKPDHLFTGLIGGTNNRAPGVPARFSGSLIGDKAALTITGAQTEDEAIYFCALWYNNHWVFGGGTKLTVL

SEQ ID NO: 1176 - protein, 106 aa, Mus musculus
QIVLTQSPAIMSASPGEKVTMTCSASSSVSYMYWYQQKPGSSPRLLIYDTSNLASGVPIRFSGSGSGTSYSLTISRMEAEDAATYYCQQWSSYPLTFGAGTKLELK

SEQ ID NO: 1177 - protein, 112 aa, Mus musculus
DVVMTQTPLSLPVSLGDQASISCRSSQSIVYSNGNTYLEWYLQKPGQSPKLLIYKVSNRFSGVPDRFSGSGSGTDFTLKISGVEAEDLGVYYCFQGSHVPYTFGGGTKLEIK

SEQ ID NO: 1178 - protein, 111 aa, Mus musculus
DIVLTQSQASLAVSLGQRATISCRASESVEYYGTSLMQWYQQKPGQPPKLLIYAASNVESGVPARFSGSGSGTDFSLNIHPVEEDDIAMYFCQQSRKVPWTFGGGTKLEIK

SEQ ID NO: 1179 - protein, 106 aa, Mus musculus; identical to SEQ ID NO: 1176

SEQ ID NO: 1180 - protein, 111 aa, Mus musculus; identical to SEQ ID NO: 1178

SEQ ID NO: 1181 - protein, 111 aa, Mus musculus
DIVLTQSPASLAVSLGQRATISCRASESVDNYGISFMNWFQQKPGQPPKLLIYAASNQGSGVPARFSGSGSGTDFSLNIHPMEEDDTAMYFFQQSKEVPWTFGGGTKLEIK

SEQ ID NO: 1182 - protein, 111 aa, Mus musculus
DIVLTQSPASLTVSLGQRATISCKASQSVDYGGDRYMNWYQQKPGQPPKLLIFAASNLESGIPARFSGSGSGTDFTLNIHPVEEEDAATYYCQQSNEDPYTFGGGTKLEIK

SEQ ID NO: 1183 - protein, 111 aa, Mus musculus
DIVLTQSPASLAVSLGQRATMSCRASESVDSYGNGFMHWYQQKPGQPPKLLIYLASNLESGVPARFSGSGSRTDFSLTIDPVEADDAAIYYCQQNNEDPLTFGAGTKLELK

SEQ ID NO: 1184 - protein, 107 aa, Mus musculus
DIVLTQSPAILSVSPGERVSFSCRASQNIGTIIHWYQQRTNGSPRLLIKYASESVSGIPSRFSGSGSGTDFTLSINSVESEDIADYYCQQSSSWPLTFGAGTKLELK

SEQ ID NO: 1185 - protein, 107 aa, Mus musculus; identical to SEQ ID NO: 1184

SEQ ID NO: 1186 - protein, 111 aa, Homo sapiens
QSALTQPHSVSESPGKTVTISCTGSSGSIASNYVQWYQQRPGSAPTTVIYEDNQRPSGVPDRFSGSIDSSSNSASLTISGLKTEDEADYYCQSYDSSNHWVFGGGTKLTVL

SEQ ID NO: 1187 - protein, 107 aa, Homo sapiens
AIRMTQSPSSLSASVGDRVTITCRASQSITGYLNWYQQKPGKAPKLLISAASSLQSGVPSRFSGSGSGTDFTLTISSLQPEDFATYYCQQSYSTPRTFGPGTKVEIK

SEQ ID NO: 1188 - protein, 113 aa, Homo sapiens
AIRMTQSPDSLAVSLGERATINCKSSQSVLYSPNNKNYLAWYQQKPGQPPKLLIYWASTRESGVPDRFSGSGSGTDFTLTISSLQAEDVAVYYCQQYYSTPFTFGQGTRLEIK

SEQ ID NO: 1189 - protein, 109 aa, Homo sapiens
EIVMTQSPGTLSLSPGERATLSCRASQSVSSSYLAWYQQKPGQAPRLLIYGASSRATGIPDRFSGSGSGTDFTLTISRLEPEDFAVYYCQQYGSSRSWTFGQGTKVEIK

SEQ ID NO: 1190 - protein, 109 aa, Homo sapiens
AIRMTQSPSSLSASVGDRVTITCRASQSISSYLNWYQQKPGKAPKLLIYAASSLQSGVPSRFSGSGSGTDFTLTISSLQPEDFATYYCQQSYSTFTLYTFGQGTKVDIK

SEQ ID NO: 1191 - protein, 107 aa, Homo sapiens
DIVMTQSPSSLSASVGDRVSITCRASQNISNYLNWYQQKPGEAPKLLISAASSLQSGVPSRFGGSGSGTGFTLTINSLQPEDFATYYCQQSHSFPFTFGPGTKVDIK

SEQ ID NO: 1192 - protein, 106 aa, Homo sapiens
AIRMTQSPSFLSVSVGDRVTITCRASQGISSYLAWYQQKPGKAPKLLIYAASTLQSGVPSRFSGSGSGTEFTLTISSLQPEDFATYYCQQLNSYVTFGGGTKVEIK

SEQ ID NO: 1193 - protein, 110 aa, Homo sapiens
QSVLTQLPSASGTPGQTVTISCSGNVFKEKSNYVYWYQQLPGTAPKLLIYRNNHRPSGVPDRFSGSKSGTSPSLAISGLRSEDEADYYCAARDDSLSGWVFSGRTKLTVL

SEQ ID NO: 1194 - protein, 106 aa, Homo sapiens
EIVMTQSPATLSLSPGERATLSCRASQSVSTSLAWYQQKPGQAPRLLIYDASNRATGVPARFSGSGSGTDFTLTISSLEPDDFAVYYCQQRTNWPLFGPGTKVEIK

SEQ ID NO: 1195 - protein, 106 aa, Homo sapiens
DIQMTQSPSSLSVSAGERATLSCRASQSVSSYLIWCHQKPGKAPKLLIYDASTLQTGVPSRFIGGGSGTNFTLTIISLQPEDFAAYYCQQNYSTWTIGQGSRVEMK

SEQ ID NO: 1196 - protein, 110 aa, Homo sapiens
QSVLTQPASVSGSPGQSITISCTGTSSDVGMYNLVSWYQQHPGQAPKLMIYEGSKRPSGVSNRFSGSKSGNTASLTISGLQAEDEAYYYCCSYAVSSTWVFGGGTKLTVL

SEQ ID NO: 1197 - protein, 109 aa, Homo sapiens
DIVMTQSPATLSLSPGERATLSCRASQSVSNFLAWYQQKPGQAPRLLIYDASNRATGIPARFSGSGSGTDFTLTISSLEPEDFAVYYCQQRSNWPPAFTFGPGTKVEIK

SEQ ID NO: 1198 - protein, 109 aa, Homo sapiens
EIVLTQSPATLSLSPGERATLSCRASQSVSSYLAWYQQKPGQAPRLLIYDASNRATGIPARFSGSGSGTDFTLTISSLEPEDFAVYYCQQRSNWPPKITFGQGTRLEIK

SEQ ID NO: 1199 - protein, 113 aa, Homo sapiens
DIQMTQSPDSLAVSLGERATIKCKSSQSVLHSSNNKNYLAWYQQKAGQPPSLLLYWASTRESGVPDRFSGSGSGTDFTLTISSLQAEDVAVYYCQQYYNNQWTFGQGTKVDIK

SEQ ID NO: 1200 - protein, 107 aa, Homo sapiens
AIRMTQSPSSLSASVGDRVTISCRATQNINYFLNWYQQKPGRAPKLLIYAASGLQSGVPSRFSGSGTGRVFTLTINSLQPDDFATYYCQQSFVSPRTFGQGTKVDIK

SEQ ID NO: 1201 - protein, 107 aa, Homo sapiens
DIVMTQSPSSLSAFVGDRVTITCRASRDIGGDLSWFQQKPGKAPERLIYAASSLESGVPSRFSGSGSATEFALTITSLQPEDFATYYCLQHKSYPLTFGGGTKVDIK

SEQ ID NO: 1202 - protein, 112 aa, Homo sapiens
EIVMTQSPLSSPVTLGQPASISCRSSQSLVHSDGNTYLSWLQQRPGQPPRLLIYKISNRFSGVPDRFSGSGAGTDFTLKISRVEAEDVGVYYCTQATQFPYTFGQGTKVDIK

SEQ ID NO: 1203 - protein, 107 aa, Homo sapiens
DIQMTQSPSSLSASVGDRVTITCRASQGIRNDLGWYQQKPGKAPKRLIYAASSLQSGVPSRFSGSGSGTEFTLTISSLQPEDFATYYCLQHNSYPLTFGGGTKVEIK

SEQ ID NO: 1204 - protein, 106 aa, Homo sapiens
SYELTQPPSVSVSPGQTASITCSGDKLGDKYACWYRQKPGQSPVLVIYQDSKRPSGIPERFSGSNSGNTATLTISGTQAMDEADYYCQAWDSSTGVFGGGTKLTVL

SEQ ID NO: 1205 - protein, 107 aa, Homo sapiens
DIVMTQSPATLSASPGERVTLSCRASQNIRNNLAWYQQKPGQAPRLLIHGASTRAAGAPARFSGSGSDTQFTLTVSSLQSEDFAVYYCHQYSKWPVTFGGGTKVDIK

SEQ ID NO: 1206 - protein, 108 aa, Homo sapiens
DIVMTQSPSFLSASVGDRVTITCRASQGISSYLAWYQQKPGKAPKLLIYAASTLQSGVPSRFSGSGSGTEFTLTISSLQPEDFATYYCQQLNSYPPYTFGQGTKLEIK

SEQ ID NO: 1207 - protein, 107 aa, Homo sapiens
DIQMTQSPSTLSASVGDRVTITCRASQSISSWLAWYQQKPGKAPKLLIYKASSLESGVPSRFSGSGSGTEFTLTISSLQPDDFATYYCQQYNSYPYTFGQGTKLEIK

SEQ ID NO: 1208 - protein, 107 aa, Homo sapiens
DIQLTQSPSSLSASVGDRVTITCRASQSISSYLNWYQQKPGKAPKLLIYAASSLQSGVPSRFSGSGSGTDFTLTISSLQPEDFATYYCQQSYSTPRTFGQGTKVEIK

SEQ ID NO: 1209 - protein, 108 aa, Homo sapiens
EIVLTQSPGTLSLSPGERATLSCRASQSVSSTYLAWYQQKPGQAPRLLIYGASSRATGIPDRFSGSGSGTDFTLTISRLEPEDFAVYYCQQYGSSPRTFGQGTKLEIK

SEQ ID NO: 1210 - protein, 107 aa, Homo sapiens
AIRMTQSPSSLSASVGDRVTITCQASQDISNYLNWYQQKPGKAPKLLIYDASNLETGVPSRFSGSGSGTDFTFTISSLQPEDIATYYCQQYDNLPITFGQGTRLEIK

SEQ ID NO: 1211 - protein, 108 aa, Homo sapiens
EIVLTQSPGTLSLSPGERATLSCRASQSVRSSYLAWYQQKPGQAPRLLIYGASSRATGIPDRFSGSGSGTDFTLTISRLEPEDFAVYYCQQYGSSPWTFGQGTKVEIK

SEQ ID NO: 1212 - protein, 110 aa, Homo sapiens
QSVLTQPPSASGTPGQRVTVSCSGSSSNIGSNTVNWYQQLPGTAPKLLIYSNNQRPSGVPDRFSGSKSGTSASLAISGLQSEDEADYFCAAWDDSLNGPVFGGGTKLTVL

SEQ ID NO: 1213 - protein, 106 aa, Homo sapiens
DIQMTQSPSTLSASVGDRVTITCRANQSISSWLAWYQQKPGKAPKLLIYKASSLESGVPSRFSGSGSGTEFTLTISSLQPDDFATYYCQQYNSYWTFGQGTKVEIK

SEQ ID NO: 1214 - protein, 110 aa, Homo sapiens
QSALTQPPSASGSPGQSVTISCTGTSSDVGGYNYVSWYQQHPGKAPKLMIYEVSKRPSGVPDRFSGSKSGNTASLTVSGLQAEDEAEYYCSSDAGSNNVVFGGGTKLTVL

SEQ ID NO: 1215 - protein, 108 aa, Homo sapiens
DIQLTQSPSSLSASVGDRVTITCRASQSISTYLNWYQQKPGKAPKLLIYAASSLQSGVPSRFSGSGSGTDFTLTISSLQPEDFATYYCQQSYSTPPWTFGQGTKVEIK

SEQ ID NO: 1216 - protein, 107 aa, Homo sapiens
EIVLTQSPATLSLSPGERATLSCRASQSVSSYLAWYQQKPGQAPRLLIYDASNRATGIPARFSGSGSGTDFTLTISSLEPEDFAVYYCQQRSNWPLTFGGGTKVEIK

SEQ ID NO: 1217 - protein, 107 aa, Homo sapiens
AIRMTQSPSSLSASVGDRVTITCQASQDISNYLNWYQQKPGKAPKLLIYDASNLETGVPSRFSGSGSGTDFTFTINSLQPEDIATYYCQQYDNLPPTFGGGTKVEIK

SEQ ID NO: 1218 - protein, 103 aa, Homo sapiens
EIVLTQSPATLSLSPGERATLSCRASQSVSSYLAWYQQKPGQAPRLLIYDASNRATGIPARFSGSGSGTDFTLTISSLEPEDFAVYYCQQRITFGQGTRLEIK

SEQ ID NO: 1219 - protein, 108 aa, Homo sapiens
DIQLTQSPSSLSASVGDRVTITCRASQSIRSYLNWYQQKPGKAPKLLIYAASSLQSGVPSRFSGSGSGTDFTLTISSLQPDDFATYYCQQSYSTPPATFGQGTKLEIK

SEQ ID NO: 1220 - protein, 108 aa, Homo sapiens
SYELTQPPSVSVAPGKTARITCGENNIGSKSVHWYQQKPGQAPVLVIYYDSDRPSGIPERFSGSNSGNTATLTINRVEAGDEADYYCQVWDSSSDHVVFGGGTKLTVL

SEQ ID NO: 1221 - protein, 112 aa, Homo sapiens
DIVMTQSPLSLPVTPGEPASISCRSSQSLLHSNGYNYLDWYLQKPGQSPQLLIYLGSNRASGVPDRFSGSGSGTDFTLKISRVEAEDVGVYYCMQALQTPFTFGPGTKVDIK

SEQ ID NO: 1222 - protein, 107 aa, Homo sapiens
DIQMTQSPSTLSASVGDSVTITCRASQSISSWLAWYQQKPGKAPKLLIYKASSLESGVPSRFSGSGSGTEFTLTISSLQPDDFATYYCQQYNNYRYTFGQGTKLEIK

SEQ ID NO: 1223 - protein, 106 aa, Homo sapiens
DIQMTQSPSTLSASVGDRVTITCRASQSISSWLAWYQQKPGKAPKLLIYKASSLESGVPSRFSGSGSGTEFTLTISSLQPDDFATYYCQQYNSYSTFGQGTKVEIK

SEQ ID NO: 1224 - protein, 112 aa, Homo sapiens
DIVMTQSPLSLPVTPGEPASISCRSSQSLLHSNGYNYLDWYLQKPGQSPQLLIYLGSNRASGVPDRFSGSGSGTDFTLKISRVEAEDVGVYYCMQALQTPHTFGGGTKVEIK

SEQ ID NO: 1225 - protein, 106 aa, Homo sapiens; identical to SEQ ID NO: 1223

SEQ ID NO: 1226 - protein, 108 aa, Homo sapiens
DIQMTQSPSSLSASVGDRVTITCRASQSISSYLNWYQQKPGKAPKVLIYAASSLQSGVPSRFSGSGSGTDFTLTISSLQPEDFATYYCQQSYSTPPLTFGGGTKVEIK

SEQ ID NO: 1227 - protein, 108 aa, Homo sapiens
EIVLTQSPGTLSLSPGERATLSCRASQSVSSSYLAWYQQKPGQAPRLLIYGASSRATGIPDRFSGGGSETDFTLTISRLEPEDCAVYYCQQYGSSPRTFGQGTKVEIK

SEQ ID NO: 1228 - protein, 108 aa, Homo sapiens
EIVLTQSPGTLSLSPGERATLSCRASQSVSSSYLAWYQQKPGQAPRLLIYGASSRATGIPDRFSGSGSGTDFTLTISRLEPEDFAVYYCQQYGSSPRTFGQGTKVEIK

SEQ ID NO: 1229 - protein, 108 aa, Homo sapiens
EIVLTQSPGTLSLSPGERATLSCRASQTVTANYLAWYQQKPGQAPRLLIYGASKRATGIPDRFSGSGSGTDFTLSISRLEPEDFAVYYCQQYTTTPRTFGGGTKVEIK

SEQ ID NO: 1230 - protein, 108 aa, Homo sapiens
EIVLTQSPGTVSLSPGERATLSCWASQSVSASYLAWYQQKPGQAPRLLIYGASSRATGIPDRFSGSGSGTDFTLTISRLEPEDFAVYYCQQYGTTPRTFGGGTKVEIK

SEQ ID NO: 1231 - protein, 111 aa, Homo sapiens
QSALTQPPSASGSPGQSVTISCTGTSSDVGGYKYVSWYQQHPGKAPKLMIYEVSKRPSGVPDRFSGSKSGNTASLTVSGLQAEDEADYYCSSYEGSNNFVVFGGGTKLTVL

SEQ ID NO: 1232 - protein, 108 aa, Homo sapiens
SYELTQPPSVSVAPGKTARITCGGNNIGSKSVHWYQQKPGQAPVLVIYFDSDRPSGIPERFSGSNSGNTATLTISRVEAGDEADYYCQVWDSSRDHVVFGGGTKLTVL

SEQ ID NO: 1233 - protein, 111 aa, Homo sapiens
QSVLTQPPSASGTPGQRVTISCSGSSSNIGSNYVYWYQQLPGTAPKLLIYRNNQRPSGVPDRFSGSKSGTSASLAISGLRSEDEADYYCAAWDDSLSGFVVFGGGTKLTVL

SEQ ID NO: 1234 - protein, 110 aa, Homo sapiens
QSALTQPASVSGSPGQSITISCTGTSSDVGGYNYVSWYQQHPGKAPKLMIYDVSNRPSGVSNRFSGSKSGNTASLTISGLQAEDEADYYCNSYTSSSTRVFGTGTKVTVL

SEQ ID NO: 1235 - protein, 111 aa, Homo sapiens
QSALTQPPSASGSPGQSVTISCTGTSSDVGGYNYVSWYQQHPGKAPKLMIYEVTKRPSGVPDRFSGSKSGNTASLTVSGLQAEDEADYYCSSYAGSNNYVVFGGGTKLTVL

SEQ ID NO: 1236 - protein, 107 aa, Homo sapiens
DIQMTQSPSTLSASVGDRVTITCRASQSISYWLAWYQQKPGKAPKLLIYQASSLESGVPSRFSGSESGTEFTLTISSLQPDDFATYYCQQYNSYPYTFGQGTKLEIK

SEQ ID NO: 1237 - protein, 111 aa, Homo sapiens
QSVLTQPPSVSEAPRQRVTISCSGSSSNIGNNAVNWYQQVPGKAPKLLIYYDDLLPSGVSDRFSGSKSGTSASLAISGLQSEDEADYYCAAWDDSLNGAWVFGGGTKLTVL

SEQ ID NO: 1238 - protein, 110 aa, Homo sapiens
QSALTQPASVSGSPGQSITISCTGTSSDVGGYNYVSWYQQHPGKAPKLMIYDVSNRPSGVSNRFSGSKSGNTASLTISGLQAEDEADYYCSSYTSSSTWVFGGGTKLTVL

SEQ ID NO: 1239 - protein, 107 aa, Homo sapiens
DIQMTQSPSTLSASVGDRVTITCRASQSMSSWLAWYQQKPGNAPKLLIYKASSLESGVPSRFSGSGSGTEFTLTISSLQPDDFATYYCQQHNSSPLTFGGGTKVEIK

SEQ ID NO: 1240 - protein, 110 aa, Homo sapiens
QSVLTQPPSVSGAPGQRVTISCTGTSSNIGAGYDVHWYQQLPGRAPKVLISGNNIRPSEVPDRFSGSRSGTSASLAITSLQPEDEAQYYCQSYDSSLYAVFGGGTKLTVL

SEQ ID NO: 1241 - protein, 112 aa, Homo sapiens
DIVMTQSPLSLSVTPGEPASISCRSSQSLLHSNGNNYFDWYLQKPGQSPQLLIYLGSNRASGVPDRFSGSGSGTDFTLKISRVEAEDVGVYYCMQVLQIPYTFGQGTKLEIK

SEQ ID NO: 1242 - protein, 112 aa, Homo sapiens
NFMLTQPHSVSESPGKTVTISCTGSSGSIASNYVQWYQQRPGSAPTTVIYEDNQRPSGVPDRFSGSIDRSSNSASLTISGLKTEDEADYYCQSYDSGNHWVVFGGGTRLTVL

SEQ ID NO: 1243 - protein, 113 aa, Homo sapiens
QSVLTQPPSVSAAPGQKVTISCSGSSSNIGNNLVSWYQQLPGTAPKLLIYENNKRPSGIPDRFSGSKSGTSATLGITGLQTGDEADYYCGAWDSSLSAGGVYVFGTGTKVTVL

SEQ ID NO: 1244 - protein, 111 aa, Homo sapiens
QPVLTQSPSASASLGASVKLTCTLSSGHSSYAIAWHQQQPEKGPRYLMKLNTDGSHSKGDGIPDRFSGSSSGAERYLTISSLQSEDEADYYCQTWGTGILVFGGGTKLTVL

SEQ ID NO: 1245 - protein, 111 aa, Homo sapiens
QSALTQPASVSGSPGQSITISCTGTSSDVGGYKYVSWYQRHPGKAPKLMIYDVSNRPSGVSNRFSGSKSGNTASLTISGLQAEDEADYYCSSYTSSSTSVVFGGGTQLTVL

SEQ ID NO: 1246 - protein, 107 aa, Homo sapiens
AIRMTQSPSSLSASVGDTVTITCQASQDISKYLNWYQQKPGKAPKLLIYDASNLETGVPSRFSGSGSGTDFTFTISSLQPEDIATYYCQQYDNLPQTFGGGTKVEIK

SEQ ID NO: 1247 - protein, 110 aa, Homo sapiens
QSALTQPASVSGSPGQSITISCTGTSSDVGSYNLVSWYQQHPGKAPKLMIYEGSKRPSGVSNRFSGSKSGNTASLTISGLQAEDEADYYCCSYAGSSTLVFGGGTKLTVL

SEQ ID NO: 1248 - protein, 107 aa, Homo sapiens
DIQLTQSPSFLSASVGDRVTITCRASQGISSYLAWYQQKPGKAPKLLIYAASTLQSGVPSRFSGSGSGTEFTLTISSLQPEDFATYYCQQLNSDSYTFGQGTKLEIK

SEQ ID NO: 1249 - protein, 107 aa, Homo sapiens
DIQLTQSPSFLSASVGDRVTITCRASQGISSYLAWYQQKPGKAPKLLIYAASTLQSGVPSRFSGSGSGTEFTLTISSLQPEDFATYYCQQLNSYPPAFGQGTRLEIK

SEQ ID NO: 1250 - protein, 109 aa, Homo sapiens
EIVLTQSPATLSLSPGERATLSCRASQSFSSYLAWYQQKPGQAPRLLIYDASNRATGIPARFSGSGSGTDFTLTISSLEPEDFAVYYCQQRNNWPPEWTFGQGTKVEIK

SEQ ID NO: 1251 - protein, 108 aa, Homo sapiens
EIVLTQSPGTLSLSPGERATLSCRASQSVSSSYLAWYQQKPGQAPRLLIYGASSRATGIPDRFSGSGSGTDFTLTISRLEPEDFAVYYCQQYGSSPWTFGQGTKVEIK

SEQ ID NO: 1252 - protein, 110 aa, Homo sapiens
NFMLTQPHSVSESPGKTVTISCTGSSGSIASNYVQWYQQRPGSAPTTVINEDNQRPSGVPDRFSGSIDSSSNSASLTISGLKTEDEADYYCQSYDSSNLVFGGGTKLTVL

SEQ ID NO: 1253 - protein, 110 aa, Homo sapiens
QSVLTQPPSASGTPGQRVTISCSGSSSNIGSNTVNWYQQLPGTAPKLLIYSNNQRPSGVPDRFSGSKSGTSASLAISGLQSEDEADYYCAAWDDSLNGVVFGGGTKLTVL

SEQ ID NO: 1254 - protein, 109 aa, Homo sapiens
EIVLTQSPGTLSLSPGERATLSCRASQSVNSRQLAWYQQKPGQAPRLLIYGASSRATGIPERFSGSGSGTDFTLTISRLESEDFAVYHCQQYGSSRALTFGGGTKVEIK

SEQ ID NO: 1255 - protein, 110 aa, Homo sapiens
SYELTQPPSVSVAPGKTARITCGGNNIGSKSVHWYQQKPGQAPVLVIYYDSDRPSGIPERFSGSNSGNTATLTISRVEAGDEADYYCQVWDSSSDHPGVVFGGGTKLTVL

SEQ ID NO: 1256 - protein, 107 aa, Homo sapiens
EIVMTQSPATLSVSPGERATLSCRASQSVSSNLAWYQQKPGQAPRLLIYGASTRATGIPARFSGSGSGTEFTLTISSLQSEDFAVYYCQQYNNWPITFGQGTRLEIK

SEQ ID NO: 1257 - protein, 110 aa, Homo sapiens
QSALTQPASVSGSPGQSITISCTGTSSDVGGYNYVSWYQQHPGKAPKLMIYDVSNRPSGVSNRFSGSKSGNTASLTISGLQAEDEADYYCSSYTSSSTLLFGGGTKLTVL

SEQ ID NO: 1258 - protein, 108 aa, Homo sapiens
DIQMTQSPSSLSASVGDRVTITCRASQSISSYLNWYQQKPGKAPKLLIYAASSLQSGVPSRFSGSGSGTDFTLTISSLQPEDFATYYCQQSYSTPPWTFGQGTKVEIK

SEQ ID NO: 1259 - protein, 110 aa, Homo sapiens
SYELTQPPSVSVAPGKTARITCGGNNIGSKSVHWYQQKPGQAPVLVIYYDSDRPSGIPERFSGSNSGNTATLTISRVEAGDEAEYHCQVWDSSSDRPGVVFGGGTKLTVL

SEQ ID NO: 1260 - protein, 107 aa, Homo sapiens
DIQMTQSPSTLSASVGDRVTITCRASQSISNWLAWFQQKPGKAPKLLIYEASSLESGVPSRFSGSGSGTEFTLTISSLQPDDFATYYCQQYNSYPWTFGQGTKVEIK

SEQ ID NO: 1261 - protein, 110 aa, Homo sapiens
NFMLTQPHSVSESPGKTVTISCTGSSGSIASNYVQWYQQRPGSAPTTVIYEDNQRPSGVPDRFSGSIDSSSNSASLTISGLKTEDEADYYCQSYDSSNWVFGGGTKLTVL

SEQ ID NO: 1262 - protein, 107 aa, Homo sapiens; identical to SEQ ID NO: 1153

SEQ ID NO: 1263 - protein, 107 aa, Homo sapiens
DIQLTQSPSFLSASVGDRVTITCRASQGISSYLAWYQQKPGKAPKLLIYAASTLQSGVPSRFSGSGSGTEFTLTISSLQPEDFATYYCQQLNSYSYTFGQGTKLEIK

SEQ ID NO: 1264 - protein, 110 aa, Homo sapiens; identical to SEQ ID NO: 1261

SEQ ID NO: 1265 - protein, 110 aa, Homo sapiens
QSALTQPASVSGSPGQSITISCTGTSNDVGSYTLVSWYQQYPGKAPKLLIFEGTKRSSGISNRFSGSKSGNTASLTISGLQGEDEADYYCCSYAGASTFVFGGGTKLTVL

SEQ ID NO: 1266 - protein, 110 aa, Homo sapiens
QSALTQPASVSGSPGQSITISCTGTSSDVGGYNYVSWYQQHPGKAPKLMIYDVSNRPSGVSNRFSGSKSGNTASLTISGLQAEDEADYYCSSYTSSSTRVFGTGTKVTVL

SEQ ID NO: 1267 - protein, 110 aa, Homo sapiens
QSALTQPASVSGSPGQSITISCTGTSSDVGGYNYVSWYQQHPGKAPKLMIYDVSNRPSGVSNRFSGSKSGNTASLTISGLQAEDEADYYCSSYTSSTTRVFGTGTRVTVL

SEQ ID NO: 1268 - protein, 111 aa, Homo sapiens
QSALTQPASVSGSPGQSITISCTGTSSDIGVYNYISWSQQHPGKAPKVMIYDVTNRPSGVSNRFSGSKSGNTASLTISGLQAEDEADYYCSSYRGSSTPYVFGTGTKVTVL

SEQ ID NO: 1269 - protein, 110 aa, Homo sapiens
QAVVTQEPSLTVSPGGTVTLTCGSSTGAVTSGHYPYWFQQKSGQAPRTLIYETSIKHSWTPARFSGSLLGGKAALTLSGAQPEDEADYYCLLSYSGARPVFGGGTKLTVL

SEQ ID NO: 1270 - protein, 108 aa, Homo sapiens
EIVMTQSPATLSVSPGERATLSCRASQSVSSHLAWYQQKPGQAPRLLIYGASTRATGIPTRFSGSGSGTEFTLTISSLQSEDFAVYYCQQYNNWPPLTFGGGTKVEIK

SEQ ID NO: 1271 - protein, 110 aa, Homo sapiens
QSALTQPASVSGSPGQSITISCTGTSSDVGYYNFVSWYQQHPGKAPKLMIYEVSNRPSGVSNRFSGSKSGNTASLIISGLQAEDEADYYCSSYRSSSTLVFGGGTKLTVL

SEQ ID NO: 1272 - protein, 111 aa, Homo sapiens
NFMLTQPHSVSESPGKTVTISCTGSSGSIASNYVQWYQQRPGSAPTTVIYEDNQRPSGVPDRFSGSIDSSSNSASLTISGLKTEDEADYYCQSYDSSNYWVFGGGTKLTVL

SEQ ID NO: 1273 - protein, 110 aa, Homo sapiens
QSALTQPASVSGSPGQSITISCTGTSSDVGSYNLVSWYQQHPGKAPKLMIYEGSKRPSGVSNRFSGSKSGNTASLTISGLQAEDEADYYCCSYAGSSTWVFGGGTKLTVL

SEQ ID NO: 1274 - protein, 107 aa, Homo sapiens
DIQMTQSPSSLSASVGDRVTITCQASQGISNYLNWYQQKPGKAPKLLIYDASNLETGVPSRFSGSGSGTDFTFTISSLQPEDIATYYCQQYDNLPITFGQGTRLEIK

SEQ ID NO: 1275 - protein, 107 aa, Homo sapiens
EIVMTQSPATLSVSPGERATLSCRASQSVSSNLAWYQQKPGQAPRLLIYGASTRATAIPARFSGSGSGTEFTLTISSLQSEDFAVYYCQQYNNWPRTFGQGTKVEIK

SEQ ID NO: 1276 - protein, 108 aa, Homo sapiens
SYELTQPPSVSVAPGQTARISCGGNNIGSKNVHWYQQKPGQAPVLVVYDDSDRPSGIPERFSGSNSGNTATLTISRVEAGDEADYYCQVWDSSSDPWVFGGGTKLTVL

SEQ ID NO: 1277 - protein, 110 aa, Homo sapiens
QSALTQPASVSGSPGQSITISCTGTSNDVGSYTLVSWYQQYPGKAPKLLIFEVTKRSSGISNRFSGSKSGNTASLTISGLQGEDEADYYCCSYAGASTFVFGGGTKLTVL

SEQ ID NO: 1278 - protein, 108 aa, Homo sapiens
EIVLTQSPGTLSLSPGERATLSCRASQSVSSTYLAWYQQKPGQAPRLLIYGASSRATGIPDRFSGSGSGTDFTLTISRLEPEDFAVYYCQQYGSSPWTFGQGTKVEIK

SEQ ID NO: 1279 - protein, 106 aa, Homo sapiens
IRMTQSPSSVSASVGDRVTITCRASQGISSWLAWYQQKPGKAPKLLIYVESSLQSGVPSRFSGSGSGTDFTLTISSLQPEDFATYYCQQANSFPLTFGGGTKVEIK

SEQ ID NO: 1280 - protein, 107 aa, Homo sapiens
DIQLTQSPSSLSASVGDRVTITCQASQDISNYLNWYQQKPGKAPKLLIYDASNLETGVPSRFSGSGSGTDFTFTISSLQPEDIATYYCQQYDNLPRSFGQGTKLEIK

SEQ ID NO: 1281 - protein, 108 aa, Homo sapiens
DIQLTQSPSSLSASVGDRVTITCRASQSISSYLNWYQQKPGKAPKLLIYAASSLQSGVPSRFSGSGSGTDFTLTISSLQPEDFATYYCQQSYSTPPWTFGQGTKVEIK

SEQ ID NO: 1282 - protein, 108 aa, Homo sapiens
EIVLTQSPGTLSLSPGERATLSCRASQSVSSSYLAWYQQKPGQAPRLLIYGASSRATGIPDRFSGSGSGTDFTLTISRLEPEDFAVYYCQQYVSSPWTFGQGTKVEIK

SEQ ID NO: 1283 - protein, 107 aa, Homo sapiens
EIVLTQSPATLSLSPGERATLSCRASQSVSSYLAWYQQKPGQAPRLLIYDASNRATGIPARFSGSGSGTDFTLTISSLEPEDFAVYYCQQRSNWPRGFGQGTKVEIK

SEQ ID NO: 1284 - protein, 107 aa, Homo sapiens
EIVLTQSPGTLSLSPGERATLSCRASQSVSGSYLAWYQQRPGQAPRLLIYGASSRATGIPDRFSGSGSGTDFTLTISRLEPEDFAVYYCQQYGSSLTFGGGTKVEIK

SEQ ID NO: 1285 - protein, 108 aa, Homo sapiens
DIQLTQSPSFLSASVGDRVTITCRASQGISSYLAWYQQKPGKAPKLLIYAASTLQSGVPSRFSGSGSGTEFTLTISSLQPEDFATYYCQQLNSYPQGTFGGGTKVEIK

SEQ ID NO: 1286 - protein, 107 aa, Homo sapiens
EIVMTQSPATLSVSPGERATLSCRASQSVSSNLAWYQQKPGQGPRLLIYGASTRATGIPARFSGSGSGTEFTLTISSLQSEDFAVYYCQQYNNWPRTFGQGTKVEIK

SEQ ID NO: 1287 - protein, 107 aa, Homo sapiens
LTQPASVSGSPGQSITISCTGTSSDVGSYNLVSWYQQHPGKAPKLMIYEDSKRPSGVSNRFSGSKSGNTASLTISGLQAEDEADYYCCSYAGSSTRLFGGGTKLTVL

SEQ ID NO: 1288 - protein, 108 aa, Homo sapiens
DIQLTQSPSSLSASVGDRVTITCRASQSISSYLTWYQQKPGKAPKLLIYAASSLQSGVPSRFSGSGSGTDFTLTISSLQPEDFATYYCQQSYSTPPWTFGQGTKVEIK

SEQ ID NO: 1289 - protein, 108 aa, Homo sapiens; identical to SEQ ID NO: 1281

SEQ ID NO: 1290 - protein, 108 aa, Homo sapiens
DIQLTQSPSSLSASVGDRVTITCRASQSISSYLNWYQQKPGKAPKLLIYVASSLQSGVPSRFSGSGSGTDFTLTISSLQPEDFATYYCQQSYSTPPITFGQGTRLEIK

SEQ ID NO: 1291 - protein, 106 aa, Homo sapiens
DIVMTQTPATLSLSPGERATLSCRASQSVSSYLAWYQQKPGQAPRLLIYDASNRATGIPARFSGSGSGTDFTLTISSLEPEDFAVYYCQQRRNWGTFGPGTKVDIK

SEQ ID NO: 1292 - protein, 109 aa, Homo sapiens
DIVMTQSPSSLSASVGDRVTITCRASQSISRYLNWYQQKPGKAPKLLIYAASSLQSGVPSRFSGSGSGTDFTLTISSLQPEDFATYYCQQSYSTPPEYTFGQGTKLEIK

SEQ ID NO: 1293 - protein, 109 aa, Homo sapiens
DIVMTQSPSFLSASVGDRVTITCRASQGISSYLAWYQQKPGKAPKLLIYAASTLQSGVPSRFSGSGSGTEFTLTISSLQPEDFATYYCQQLNSYPPKFTFGPGTKVEIK

SEQ ID NO: 1294 - protein, 110 aa, Homo sapiens
QSALTQPASVSGSPGQSLTISCTGTSSDVGGYNYVSWYQQHPDKAPKLMIYDVNNRPSGVSNRFSGSKSGSTASLTISGLQAEDEADYYCSSYAGSSTQVFGGGTKLTVL

SEQ ID NO: 1295 - protein, 110 aa, Homo sapiens
QSVLTQPASVSGSPGQSITISCTGTSSDVGGYNYVSWYQQHPGKVPKLMIYDVSNRPSGVSNRFSGSKSGNTASLTISGLQAEDEADYYCSSYTSSSAQLFGGGTKLTVL

SEQ ID NO: 1296 - protein, 110 aa, Homo sapiens
QSALTQPASVSGSPGQSITISCTGTSSDVGGYNYVSWYQQHPDKAPKLMIYDVSNRPSGVSNRFSGSKSGNTASLTISGLQAEDEADYYCSSYTSGSTQVFGGGTKLTVL

SEQ ID NO: 1297 - protein, 107 aa, Homo sapiens
DVVMTQSPSSLSASVGDRVTITCQASQDISNYLNWYQQKPGKAPKLLIYDASNFATGVPSRFSGTGSGTDFTFTISSLQPEDIATYYCQQYDNLPITFGQGTRLEIK

SEQ ID NO: 1298 - protein, 112 aa, Homo sapiens
DVVMTQSPLSLPVTLGQPASISCRSSQSLVYSDGNTYLNWFQQRPGQSPRRLIYKVSNRDSGVPDRFSGSGSGTDFTLKISRVEAEDVGVFYCMQGTHWPPTFGQGTKVDIK

SEQ ID NO: 1299 - protein, 111 aa, Homo sapiens
QAVLTQPPSVSGAPGQRVTISCTGSSSNIEAGYDVHWYQQLPGTAPKLLIYVNSNRPSGVPDRFSGSKSGTSASLAITGLQAEDEADYYCQSYDSSLSGVVFGGGTKLIVL

SEQ ID NO: 1300 - protein, 108 aa, Homo sapiens
SYELTQPPSVSVAPGQTARITCGGNNIGSKSVHWYQQKPGQAPVLVVYDDSDRPSGIPERFSGSNSGNTATLTISRVEAGDEADYYCQVWDSSSDPWVFGGGTKLTVL

SEQ ID NO: 1301 - protein, 109 aa, Homo sapiens
SYELTQPPSVSVAPGKTARITCGGNNIGSKSVHWYQQKPGQAPVLVVYDDTDRPSGIPERFSGSSSGNTATLTISRVEAGDEADYYCQVWDSSSDHPVVFGGGTKLTVL

SEQ ID NO: 1302 - protein, 114 aa, Homo sapiens
NFMLTQPHSVSESPGKTVTISCTRSSGSIANNYVKWYQQRPGSSPTTVIYEDNQRPSGVPDRFSGSIDSSSNSASLTISGLKTEDEADYYCQSYDSSNHEEIWVFGGGTKLIVL

SEQ ID NO: 1303 - protein, 108 aa, Homo sapiens
SYELTQSPSVSVAPGQTARITCGGNNIGSKSVHWYQRKPGQAPVLVVYDDSDRPSGIPERFSGSNSGNTATLTISRVEAGDEADYYCQVWDNNSDHLVFGGGTKLTVL

SEQ ID NO: 1304 - protein, 108 aa, Homo sapiens
EIVMTQSPGTLSLSPGERATLSCRASQSVSSSYLAWYQQKPGQAPRLLIYGVSSRATGIPDRFSGSGSETDFTLTISRLEPEEFAVYYCQQYGSSPRTFGQGTKLEIK

SEQ ID NO: 1305 - protein, 111 aa, Homo sapiens
QSVLTQPPSASSTPGQRVTISCSGSSSNIGSNYVYWYQQLPGTAPKLLIYTNNQRPSGVPDRFSGSKSGTSASLAISGLRSEDEADYYCAAWDDSLSGRVVFGGGTKLTVL

SEQ ID NO: 1306 - protein, 110 aa, Homo sapiens
QAVVTQPPSASGTPGQRVTISCSGSSSNIGSNTVNWYQQLPGTAPKLLIYSNNQRPSGVPDRFSGSKSGTSASLAISGLQSEDEADYYCAAWDDSLNGPVFGGGTKLTVL

SEQ ID NO: 1307 - protein, 108 aa, Homo sapiens
SYELTQPPSVSVSPGQTARITCSGDALPKQYAYWYQQKPGQAPVLVIYKDSERPSGIPERFSGSSSGTTATLTISGVQAEDEADYYCQSADSSGTYLVVFGGGTKLAV

SEQ ID NO: 1308 - protein, 107 aa, Homo sapiens
DIQLTQSPSSLSASVGDRVTITCRASQSISSYLNWYQQKPGKAPKLLIYAASNLQSGVPSRFSGSGSGTDFTLTISSLQPEDFATYYCQQSYSTPWTFGQGTKVEIK

SEQ ID NO: 1309 - protein, 110 aa, Homo sapiens
QSALTQPPSASGTPGQRVTISCSGSSSNIGSNTVNWYQQLPGTAPKVLVYSNDQRPSGVPDRFSGSKSGTSASLAISGLQSEDEADYYCAAWDDSLNGPVFGGGTKLTVL

SEQ ID NO: 1310 - protein, 111 aa, Homo sapiens
QTVVTQEPSLTVSPGGTVTLTCVSSTGAVTSGYYPNWFQQKPGQAPRALIYSTSKKHSWTPARFSGSLLGGKAALTLSGVQPEDEAEYYCLLYYGGAQRWVFGGGTKLTVL

SEQ ID NO: 1311 - protein, 112 aa, Homo sapiens
QSVLTQPASVSGSPGQSITISCTGTSSDVGSYNLVSWYQQHPGKAPKLMIYEGSKRPSGVSNRFSGSKSGNTASLTISGLQAEDEADYYCYSYAGSSTFVFVFGTGTKVIVL

SEQ ID NO: 1312 - protein, 110 aa, Homo sapiens
QSALTQPPSASGTPGQRVTISCSGSSSNIGSNYVYWYQQLPGAAPKLLIYRNDQRPSGVPDRFSGSKSGTSVSLAISGLRSEDEADYYCAAWDDSLSGWVFGGGTKLTVL

SEQ ID NO: 1313 - protein, 107 aa, Homo sapiens
EIVLTQSPGTLSLSPGERATLSCRASQSVSSYLAWYQQKPGQAPRLLIYGASSRATGIPDRFSGSGSGTDFTLTISRLEPEDFAVYYCQQYGSSPRTFGQGTKLEIK

SEQ ID NO: 1314 - protein, 110 aa, Homo sapiens
QSVLTQPPSASGSPGQSVTISCTGTSSDVGGYDYVSWYQQHPGKAPKLMIYEVSKRPSGVPDRFSGSKSGNTASLTVPGLQAEDEADYYCTSYAGSNNFVFGGGTKLIVL

SEQ ID NO: 1315 - protein, 110 aa, Homo sapiens
QTVVTQPASVSGSPGQSITISCTGTSSDVGGYNYVSWYQQHPDKAPKLIIYDVSNRPSGVSNRFSGSKSGNTASLTISGLQAEDEAAYYCSSYTSSSTQVFGGGTKLTVL

SEQ ID NO: 1316 - protein, 110 aa, Homo sapiens
QSALTQPTSVSGSPGQSITISCTGTSSDVGGYNYVSWYQQHPGKAPKLIIYDVSNRPSGVSNRFSGSKSGNTASLTISGLQAEDEADYYCSSYTVSSTQVFGGGTKLTVL

SEQ ID NO: 1317 - protein, 110 aa, Homo sapiens
QPVLTQPASVSGSPGQSLTISCTGTSSDIGGFNYVSWYQQHPGKAPKLMIFDVSKRPSGVPNRFSGSKSGNTASLTISGLQAEDEGDYYCSSYTISSAQVFGGGTKLTVL

SEQ ID NO: 1318 - protein, 110 aa, Homo sapiens
QSALTQPASVSGSPGQSITISCTGTSSDVGGYNHVSWYQQHPGKAPKLMIYDVSNRPSGVSNRFSGSKSGNTASLTISGLQAEDEADYYCSSYTSSSAQLFGGGTKLTVL

SEQ ID NO: 1319 - protein, 110 aa, Homo sapiens
QSVLTQPASVSGSPGQSITISCTGTSSDVGGYNYVSWYQQHPGKVPKLMIYDVSNRPSGVSNRFSGSKSGNTASLTISGLQAEDEADYYCSSYTSSSAQVFGGGTKLTVL

SEQ ID NO: 1320 - protein, 107 aa, Homo sapiens
DIQLTQSPSSLSASVGDRVTITCRASQTASSYLNWYQQKPGKAPNLLIYAASSLQSGVPSRFSGSGSVTDFTLTISSLQPEDFATYYCQQSYSTPPTFGQGTKVDIK

SEQ ID NO: 1321 - protein, 107 aa, Homo sapiens
DIQMTQSPSSLSASVGDRVTITCRASQNISSYLNWYQQEAGKAPKLLIYAASSLQSGVPSRFSGSGSGTDFTLTISSLQPEDFATYYCQQSYSTPRTFGQGTKVDIK

SEQ ID NO: 1322 - protein, 108 aa, Homo sapiens
DIQMTQSPSSLSASVGDRVTITCRASQGIRNDLGWYQQKPGKAPKRLIYAASSLQSGVPSRFSGSGSGTEFTLTISSLQPEDFATYYCLQHNSYPILTFGGGTKLEIK

SEQ ID NO: 1323 - protein, 109 aa, Homo sapiens
QLVLTQPPSVSVAPGKTARITCGGNNIGSKSVYWYQQKPGQAPVLVVYDDSDRPSGIPERFSGSNSGNTATLTISRVEAGDEADYYCQVWDSSSDHPYVFGSGTKVTVL

SEQ ID NO: 1324 - protein, 108 aa, Homo sapiens
EIVLTQSPGTLSLSPGERATLSCRASQSVSSSYLAWYQQKPGQAPRLLIYGASSRATGIPDRFSGSGSGTDFTLTISRLEPEDFAVYYCQHYGSSLWTFGQGTKLEIK

SEQ ID NO: 1325 - protein, 112 aa, Mus musculus
DVLMTQTPLSLPVSLGDQASISCRSSQSIVHSNGNTYLEWYLQKPGQSPKLLIYKVSNRFSGVPDRFSGSGSGTDFTLKISRVEAEDLGVYYCFQGSHVPLTFGAGTKLELK

SEQ ID NO: 1326 - protein, 109 aa, Homo sapiens [sequence omitted]

SEQ ID NO: 1327 - protein, 110 aa, Homo sapiens; identical to SEQ ID NO: 1273

SEQ ID NO: 1328 - protein, 112 aa, Homo sapiens
DIVMTQSPLSLPVTPGEPASISCRSSQSLLHSNGYNYLDWYLQKPGQSPQLLIYLGSNRASGVPDRFSGSGSGTDFTLKISRVEAEDVGVYYCMQALQTPGTFGPGTKVDIK

SEQ ID NO: 1329 - protein, 112 aa, Homo sapiens; identical to SEQ ID NO: 1328

SEQ ID NO: 1330 - protein, 110 aa, Homo sapiens
QSALTQPASVSGSPGQSITISCTGTSGDVGSYNLVSWYQQHPGKAPKLVIYEATKRPSGVSNRFFASKSGNTASLTISGLQAEDEADYYCCSYAGVRTVVFGGGTKLTVL

SEQ ID NO: 1331 - protein, 110 aa, Homo sapiens
QSALTQPASVSGSPGQSITISCTGTSGDIGSYNLVSWYQQYPGKAPKLIIYEASKRPSGVSNRFFASKSGNTASLTISGLQAEDEADYYCCSYAGVRTVVFGGGTKLTVL

SEQ ID NO: 1332 - protein, 108 aa, Homo sapiens; identical to SEQ ID NO: 1251

SEQ ID NO: 1333 - protein, 107 aa, Homo sapiens
DIQMTQSPSSLSASVGDRVTITCQASQDISTYLNWYQQKPGKAPKLLIYDASNLETGVPSRFSGSGSGTDFTFTISSLQPEDIATYYCQQYDNLLFTFGPGTKVDVK

SEQ ID NO: 1334 - protein, 111 aa, Homo sapiens
QSALTQPASVSGSPGQSITISCTGTSGDVGAYNYVSWYQQHPVKAPKLMIYDVSKRPSGVSNRFSGSKSGNTASLTISGLQTEDEADYYCSSYTSSSTLWVFGGGTKLTVL

SEQ ID NO: 1335 - protein, 86 aa, Homo sapiens
ITCRASQSISSYLNWYQQKPGKAPKLLIYAASSLQSGVPSRFGGSASGTDFTLTISSLQPEDFATYYCQQSYSTFTFGPGTKVDIK

SEQ ID NO: 1336 - protein, 113 aa, Homo sapiens
DIVMTQSPDFLAVSLGERATINCKSSQSVLHTPKNKNYLAWYKQKPGQPPKVLIYWASTRESGVPERFSGSGSGTDFTLIISSLQAEDAAVYYCQQYYTAPLTFGGGTKVEIK

SEQ ID NO: 1337 - protein, 108 aa, Homo sapiens
EIVLTQSPATLSLSPGERATLSCRASQSVSSYLAWYQQKPGQAPRLLIYDTSNRATGIPARFSGSGSGTDFTLTISSLEPEDFAVYYCQQRSNWPPYTFGQGTKLEIK

SEQ ID NO: 1338 - protein, 110 aa, Homo sapiens
QSALTQPASVSGSPGQSITISCTGTSSDVGGYHYVSWYQHHPGKAPKLIIYDVIKRPSGVSNRFSGSKSGNTASLTISGLQAEDEAYYYCSSYTSSTTWVFGGGTRLTVL

SEQ ID NO: 1339 - protein, 112 aa, Homo sapiens
QSVLTQPPSVSGAPGQRVTISCTGSSSNIGAGYNVHWYQQLPGTAPKLLIYGNNNRPSGVPDRFSGSKSGTSASLAITGLQAEDEADYYCQSFDSSLSGSDVFGTGTKVSVL

SEQ ID NO: 1340 - protein, 111 aa, Homo sapiens
QSVLTQPPSASGTPGQRVTISCSGSSSNIGSNYVYWYQQLPGTAPKLLIYRNNQRPSGVPDRFSGSKSGTSASLAISGLRSEDEADYYCAAWDASLSGHVVFGGGTKLTVL

SEQ ID NO: 1341 - protein, 113 aa, Homo sapiens
DIVMAQTPLSLPVTPGEPASISCRSSQSLLDSDDGNTYFDWYLQKPGQSPQLLIYTLSYRASGVPDRFSGSGSGTDFTLKINRVEAEDVGVYYCMQRIEFPWTFGQGTKLEIK

SEQ ID NO: 1342 - protein, 113 aa, Homo sapiens; identical to SEQ ID NO: 1336

SEQ ID NO: 1343 - protein, 107 aa, Homo sapiens
DIQMTQSPSSLSASVGDRVTITCRASQGITNYLAWFQQKPGKAPKSLIYAVSSLQSGVPSKFSGSGSGTDFTLTISSLQPEDFATYYCQQYNSYPWTFGQGTKVEIK

SEQ ID NO: 1344 - protein, 109 aa, Homo sapiens
SYELTQPPSVSVSPGQTARITCSGDALPKQYAYWYQQKPGQAPVLVIYKDSERPSGIPERFSGSSSGTTVTLTISGVQAEDEADYYCQSADSSGTYFWVFGGGTKLTVL

SEQ ID NO: 1345 - protein, 113 aa, Homo sapiens; identical to SEQ ID NO: 1336

SEQ ID NO: 1346 - protein, 110 aa, Homo sapiens
QSVLTQPPSVSGTPGQRVTISCSGSNSKIGSYSVNWYQQLPGTAPKLLIYRNNQRPSGVPDRFFGSKSGTSASLAISGLQSEDEADYYCSVWDDSLNGPLFGGGTKLTFV

SEQ ID NO: 1347 - protein, 106 aa, Homo sapiens
SYELTQPPSVSVSPGQTARITCSGDAWPNQYAYWYQQKPGQAPVLVIYKDTERPSGIPERFSGSSSGTTVTLTISGVQAEDEADYFCQSSDSSGVVFGGGTKLTVL

SEQ ID NO: 1348 - protein, 107 aa, Homo sapiens
DIQMTQSPSTLSASVGDRVTITCRASQSISSWLAWYQQKPGKAPKLLIYKASSLESGVPSRFSGSGSGTEFTLTISSLQPDDFATYYCQQYNSYSWTFGQGTKVEIK

SEQ ID NO: 1349 - protein, 110 aa, Homo sapiens
QSVLTQPPSASGTPGQRVTISCSGSNSKIGSYSVNWYQQLPGTAPKLLIYRNNQRPSGVPDRFSGSKSGTSASLAISGLQSEDEADYYCSVWDDSLNGPLFGGGTKLTFL

SEQ ID NO: 1350 - protein, 107 aa, Homo sapiens
DIQMTQSPSSLSASVGDRVTITCRASQSISSYLNWYQQKPGKAPKLLIYAASSLQSGVPSRFSGSGSGTDFTLTISSLQPEDFATYYCQQSYSTPPTFGGGTKVQIK

SEQ ID NO: 1351 - protein, 107 aa, Homo sapiens
DIQMTQSPSSLSASVGDRVTITCRASQSISSYLNWYQQRPGKAPKLLIYAASSLQSGVPSRFSGSGYGTDFTLTISSLQPEDFATYYCQQSYNTPRTFGQGTKVEIK

SEQ ID NO: 1352 - protein, 106 aa, Homo sapiens
DIQMTQSPSSVSASVGDRVTITCRASQGISSWLAWYQQKPGKAPKLLIYAASSLQSGVPSRFSGSGSGTDFTLTISSLQPEDFATYYCQQTNSFPTFGQGTRLEIR

SEQ ID NO: 1353 - protein, 107 aa, Homo sapiens
EIVLTQSPGTLSLSPGERATLSCRASQSVSSSFLAWYQQKPGQAPRLLIYGASNRATGIPDRFSGSGSGTDFTLTISRLEPEDFAVYYCQQYGNSPQFGPGTKVDIK

SEQ ID NO: 1354 - protein, 108 aa, Homo sapiens
DIQMTQSPSSLSASVGDRVTITCRASQSISNWLAWYQQKPGKAPKLLIYKASSLESGVPSRFSGSGSGTEFTLTISSLQPDDFATYYCQQYNSYSTWTFGQGTKVEIK

SEQ ID NO: 1355 - protein, 107 aa, Homo sapiens
DIQMTQSPSSLSASVGDRVTITCRASQSISSFLNWYQQKPGKAPKLLIYAAFNLQSGVPSRFSGSGSGTDFTLTISSLQSEDFATYYCQQSYNTPYTFGQGTKLEIK

SEQ ID NO: 1356 - protein, 110 aa, Homo sapiens
QSVLTQPPSASGTPGQRVIISCSGSSSNIGSNTVKWYHQLPGTAPKLLICSNNQRPSGVPDRFSGSKSDTSASLAISGLQSEDEADYYCAAWDDSLNALVFGGGTKLTVL

SEQ ID NO: 1357 - protein, 107 aa, Homo sapiens
DIQMTQSPSSLSASVGDRVTITCRASQSIAGYLNWYQQKPGKAPKLLIYGTTSLQSGVPVRFSGSGSGTDFTLTISSLQPEDFATYYCQQSYSTPGTFGQGTRLEIK

SEQ ID NO: 1358 - protein, 108 aa, Homo sapiens
DIQMTQSPSSLSASVGDRVTITCQASQDINHYLNWYQQKPGKAPKLLIYDASNLETGVPSRFSGSGSGTDFTFTITSLQPEDVATYYCQQSDNLPMYTFGQGTKLEIK

SEQ ID NO: 1359 - protein, 109 aa, Homo sapiens
SYVLTQPPSVSVAPGKTARITCEGNNIGSKSVHWYQQKPGQAPVLVVYDDSGRPSGIPERFSGSNSGNTATLTISRVEAGDEADYFCQVWDSSSDHHVVFGGGTKLTVL

SEQ ID NO: 1360 - protein, 110 aa, Homo sapiens
QSVLTQPPSASGTPGQRVTISCSGSNSNIGSYTVNWYQQFPGTAPKLLIYDNNQRTSGVPDRFSGSKSGTSASLAISGLQSEDEANYYCLVWDDSLNGLVFGGGTKLTVL

SEQ ID NO: 1361 - protein, 112 aa, Homo sapiens
QSVLTQPPSVSGAPGQRVTISCTGSSSNIGSGSDVHWYQQLPGTAPKLLIYGNTNRPSGVPDRFSGSKSGTSASLAITGLQAEDEADYYCQSYDSRLSGFVVFGGGTKLTVL

SEQ ID NO: 1362 - protein, 107 aa, Homo sapiens
DIQMTQSPSSLSASVGDRVTITCRASQSISNYLNWYQQKPGKAPKLLIYAASSLQSGVPSRFSGSGSGTDFSLTISSLQPEDFATYSCQQSYTTLLTFGGGTKVEIK

SEQ ID NO: 1363 - protein, 108 aa, Homo sapiens
EIVLTQSPGTLSLSPGERATLSCRASQSVSSSYLGWYQQKPGQAPRLLIYGASSRATGIPDRFSGSGSGTDFTLTISRLEPEDFAVYYCQQYGSSPWTFGQGTKVEIK

SEQ ID NO: 1364 - protein, 111 aa, Homo sapiens
QSVLTQPPSVSGAPGQRVTLSCTGSNSNIGAGYDVHWYQQLPGTAPKLLIYGNSNRPSGVPDRFSGSKSGTSASLAITGLQAEDEADYYCQSYDSSLSDSVFGGGTKVTVL

SEQ ID NO: 1365 - protein, 107 aa, Homo sapiens
DIQLTQSPSFLSASVGDRVTITCRASQGISNYLAWYQQKPGTAPNLLIYAASTLQSGVPSRFSGSGSGTEFTLTISSLQPEDFATYYCQLLNSHPLTFGQGTRLEIK

SEQ ID NO: 1366 - protein, 108 aa, Homo sapiens
SSELTQDPAVSVALGQTVRITCQGDSLRSYYASWYQQKPGQVPILVIYDKNNRPSGIPDRFSGSSSGNTASLTITGAQAEDEADYYCNSRDSSGNAVVFGGGTKLTVL

SEQ ID NO: 1367 - protein, 107 aa, Homo sapiens
DIQMTQSPSSLSASVGDRVTITCQASQDISNYLNWYQQKPGKAPKLLIYDASNLETGVPSRFSGSGSGTDFTFTISSLQPEDIATYYCQQYANLPFTFGPGTKVDIK

SEQ ID NO: 1368 - protein, 108 aa, Homo sapiens; identical to SEQ ID NO: 1366

SEQ ID NO: 1369 - protein, 110 aa, Homo sapiens
QSVLTQAPSASGTPGQRVTISCSGSNSNIGSYTINWYQQLPGTAPKLLIYGNDQRTSGVPDRFSGSKFGTSASLAISGLQSEDENNYYCAVWDDSLNGLVFGGGTKLTVL

SEQ ID NO: 1370 - protein, 107 aa, Homo sapiens
DIQMTQSPSSLSASVGDRVTITCRASQNIASYLNWYQQKPGKAPKLLIYAASSLQSGVPSRFSGSGSGTDFTLTISSLQPEEFATYYCQQSYSTPWTFGQGTKVEIK

SEQ ID NO: 1371 - protein, 107 aa, Homo sapiens
DIVMTQSPATLSVSPGERAILSCRASQSVRSNLAWYQQKPGQAPRLLISGASTRATAIPARFSGSGSGTEFTLTITSLQSEDCAVYYCHQYNNWPQTFGQGTKVEIK

SEQ ID NO: 1372 - protein, 112 aa, Homo sapiens
NFMLTQPHSVSESPGKTVTISCTGSSGSIASNYVQWYQQRPGSAPTTVISEDNQRPSGVPDRFSGSIDSSSNSASLTISGLKTEDEADYYCQSYDGINRAWVFGGGTKLTVL

SEQ ID NO: 1373 - protein, 112 aa, Homo sapiens
DIVMTQSPLSLPVTPGEPASISCRSSQSLLHSLGYNSLSWYLQKPGQSPHLLIYLGSNRASGVPDRFSGSGSATDFTLKISRLEAEDVGVYYCMQALQTPLTFGQGTRLEIK

SEQ ID NO: 1374 - protein, 108 aa, Homo sapiens
DIQMTQSPSSLSACVGDRVTITCRASQSISSYLNWYQQKPGKGPKLLIYAASSLQSGVPSRFSGSGSGTDFTLTISSLQPEDFATYYCQQSYSSLSITFGQGTRLEIK

SEQ ID NO: 1375 - protein, 108 aa, Homo sapiens
DIQMTQSPSSLSASVGDRVTITCRASQSISSYLNWYQQKPGKAPKLLIYAASSLESGVPSRFSGSGSGTDFTLTISSLQPEDFATYYCQQSYEIPPWTFGQGTKVEIK

SEQ ID NO: 1376 - protein, 107 aa, Homo sapiens
DIQMTQSPSSLSASVGDRVTITCQASQDINNYLNWYQQKPGKAPKLLIYDASNLETGVPLRFSGSGSGTDFIFTISSLQPEDIATYYCQQYDNLPPVFGGGTKVEIK

SEQ ID NO: 1377 - protein, 111 aa, Homo sapiens
QSVLTQPPSVSGAPGQRVTISCTGSSSNIGAGYDVHWYQQLPETAPKLLIYANSNRPSGVPDRFSGSKSGTSASLAITGLQAEDEADYYCQSYDSSLSGSVFGGGTKLTVL

SEQ ID NO: 1378 - protein, 110 aa, Homo sapiens
NFMLTQPHSVSESPGKTVTISCTGSSGSIASNYVQWYQQRPGSAPTTVIYEDNQRPSGVPDRFSGSIDSSSNSASLTISGLKTEDEADYYCQSYDSGNPIFGGGTKLTVL

SEQ ID NO: 1379 - protein, 112 aa, Homo sapiens
DIVMTQSPDSLAVSLGERATINCKSSQSVLYSSNNKNYLAWYQQKPGQPPKLLMYWASTRESGVPDRFSGSGSGAEFTLTISSLQAEDVAIYYCQQYYSTLTFGGGTKVEIK

SEQ ID NO: 1380 - protein, 107 aa, Homo sapiens
DIQMTQSPSSLSASVGDRVTITCQASQDINNYLNWYQQKPGKAPKLLIYDASNLETGVPLRFSGSGSGTDFTFTISSLQPEDIATYYCQQYDNLPPVFGGGTKVEIK

SEQ ID NO: 1381 - protein, 112 aa, Homo sapiens
NFMLTQPHSVSESPGKTVTFSCTGSSGSIASNYVQWYQQRPGSAPTTVIYEDNQRPSGVPDRFSGSIDSSSNSASLTISGLKTEDEADYYCQSYDGINRWLVFGGGTKLTVL

SEQ ID NO: 1382 - protein, 117 aa, Homo sapiens
QPVLTQPPSASASLGASVTLTCTLSSGYSNYKVDWYQQRPGKGPRFVMRVGTGGIVGSKGDGIPDRFSVLGSGLNRYLTIKNIQEEDESDYHCGADHGSGSNFEYVVFGGGTKLTVL

SEQ ID NO: 1383 - protein, 110 aa, Homo sapiens
QSVVTQPPSASGTPGQRVTISCSGSSSNIGYNIVNWYQQLPGTAPKLLIYSNNQRPSGVPDRFSGSKSGTSASLSISGLQSEDEADYYCAAWDDSLNGYVFGTGTKVTVL

SEQ ID NO: 1384 - protein, 107 aa, Homo sapiens
DIQLTQSPSFLSASVGDRVTITCRASQGISSYLAWYQQKPGKAPKLLIYAASTLQSGVPSRFSGSGSGTEFTLTISSLQPEDFATYYCQQLNSYPVTFGQGTKVEIK

SEQ ID NO: 1385 - protein, 112 aa, Homo sapiens
QSALTQPASVSGSPGQSITISCTGTSSDVGDYNYVSWYQQHPGKAPKLMIYDVSNRPSGVSNRFSGSKSGNTASLTISGLQAEDEAEYYCSSYTSSSTLLYVFGTGTKVTVL

SEQ ID NO: 1386 - protein, 109 aa, Homo sapiens
SYVLTQPPSVSVAPGKTARITCGGNNIGNKGVHWYQQKPGQAPVLVVDDDSDRPSGIPERFSGSNSGNTATLIISSVEVGDEADFYCQVWDSSSDHPGVFGGGTKLTVL

SEQ ID NO: 1387 - protein, 109 aa, Homo sapiens
EIVLTQSPATLSLSPGERATLSCRASQSVSSFLAWYQQKPGQAPRLLIYDASNRATGIPARFSGSGSGTDFTLTISSLEPEDFAVYYCHYRSNWPPVLTFGGGTKVEIE

SEQ ID NO: 1388 - protein, 108 aa, Homo sapiens
DIQMTQSPSSLSASVGDRVTITCQASQDITNYLNWYQQKPGKAPKLLIYDASNLETGVPSRFSGSGSGTDFTFTISSLQPEDFATYYCQQYDNLYSVHFGQGTKLEIK

SEQ ID NO: 1389 - protein, 112 aa, Homo sapiens; identical to SEQ ID NO: 1385

SEQ ID NO: 1390 - protein, 112 aa, Homo sapiens; identical to SEQ ID NO: 1385

SEQ ID NO: 1391 - protein, 107 aa, Homo sapiens; identical to SEQ ID NO: 1365

SEQ ID NO: 1392 - protein, 109 aa, Homo sapiens
EIVLTQSPATLSLSPGERATLSCRASQSVSSFLAWYQQKPGQAPRLLIYDASNRPTGIPARFTGSGSGTDFTLTISSLEPEDFAVYYCQHRTNWPPLFTFGPGTKVDIK

SEQ ID NO: 1393 - protein, 106 aa, Homo sapiens
SYELTQPPSVSVSPGQTASITCSGDKLGDKYACWYQQRPGQSPVLVIYQDSKRPSGIPERFSGSNSGNTATLTISGTQAMDEADYYCQAWDSSTGVFGTGTKVTVL

SEQ ID NO: 1394 - protein, 107 aa, Homo sapiens
DIQMTQSPSTLSASVGDRVTITCRASQSVSTWLAWYQQKPGKAPNLLIYEASSLESGVPSRFSGSGSGTEFTLTISSLQPDDFATYYCQQYNTYSGTFGQGTKVEIK

SEQ ID NO: 1395 - protein, 106 aa, Homo sapiens; identical to SEQ ID NO: 1393

SEQ ID NO: 1396 - protein, 107 aa, Homo sapiens
DIQMTQSPSSLSASVGDRVTITCRARQSISNYLNWYQQKPGKAPKLLIYAASSLHSGVPSRFSGSGSGTDFTLTISSLQPEDFATYYCQQTYSTFWTFGQGTNVEIK

SEQ ID NO: 1397 - protein, 106 aa, Homo sapiens
SYELTQPPSVSVSPGQTASITCSGDKLGDKYACWYQQKPGQSPVVVIYQDSKRPSGIPERFSGSNSGNTATLTISGTQAMDEADYYCQAWDSSTAVFGGGTKLTVL

SEQ ID NO: 1398 - protein, 110 aa, Homo sapiens
QSALTQPASVSGSPGQSITISCTGTSSDVGGYNYVSWYQQHPGKAPKLMIYDVSNRPSGVSNRFSGSKSGNTASLTISGLQAEDEADYCCSSYTSSRAVLFGGGTKLTVL

SEQ ID NO: 1399 - protein, 110 aa, Homo sapiens
SYVLTQPPSVSVAPGKTANITCGGNNIGRKSVHWYQQKSGQAPVLVVYDDSDRPSGIPERFSGSNSGNTATLTISRVEAGDEADYYCQVWDSSSDHPEWVFGGGTKLTVL

SEQ ID NO: 1400 - protein, 106 aa, Homo sapiens
DIQMTQSPSSLSASVGDRVTITCRASQSISSYLNWYQQKPGKAPKLLIYGASSLQTGVPSRFSGSGSGTDFTLTIRSLQPEDFASYYCQQSYSTPTFGGGTKVEIK

SEQ ID NO: 1401 - protein, 111 aa, Homo sapiens
QSALTQPASVSGSPGQSITISCTGTSSDIGGYNYVSWYQQHPGKAPKLLIYDVSNRPSGVSTRFSGSKSGNTASLTISGLQAEDEADYYCSSYTSSSTHVVFGGGTKLTVL

SEQ ID NO: 1402 - protein, 107 aa, Homo sapiens; identical to SEQ ID NO: 1394

SEQ ID NO: 1403 - protein, 113 aa, Homo sapiens
DIVMTQSPDFLAVSLGERATISCKSSQSVLYTPKNKNYLAWYKQKPGQPPKVLIYWASTRESGVPDRFSGSGSGTDFTLIISSLQAEDAAVYYCQQYYTAPLTFGGGTRVEIK

SEQ ID NO: 1404 - protein, 109 aa, Homo sapiens
EIVLTQSPGTLSLSPGERATLSCRASQSVSSSYLAWYQQKPGQAPRLLIYGASSRATGIPDRFSGSGSGTDFTLTISRLEPEDFAVYYCQHYGSSRGWTFGQGTKVEIK

SEQ ID NO: 1405 - protein, 108 aa, Homo sapiens
EIVLTQSPGTLSLSPGERATLSCRASQSVSSNFLAWYQQKPGQAPRLLIYGASSRATGIPDRFSGSGSGTDFTLTISRLEPEDFAVYYCQQYGRSPITFGQGTRLEIK

SEQ ID NO: 1406 - protein, 106 aa, Homo sapiens
SYELTQPPSVSVSPGQTASITCFGDKLGDKYACWFQQKPGQSPVLIIYQGAKRPSGIPERFSGSNSGNTATLTISGTQAMDEADYYCQAWDSSTVVFGGGTKLTVL

SEQ ID NO: 1407 - protein, 107 aa, Homo sapiens
DIQMTQSPSSLSASVGDRVTITCRASQTITNYLNWYQLKSGRAPKLLIYAASSLQSGVPSRFSGSGSGTDFTLTISSLQPEDFATYYCQQSYSTPYTFGQGTKLEIK

SEQ ID NO: 1408 - protein, 110 aa, Homo sapiens
QSVLTQPPSVSGAPGQRVTISCTGSSSNIGAGYDVHWYQQLPGTAPKLLIFINSNRPSGVPDRFSGSKSGTSASLAITGLQAEDEADYYCQSYDSSLGALFGGGTKLTVL

SEQ ID NO: 1409 - protein, 107 aa, Homo sapiens
DIQMTQSPSSVSASVGDRVTITCRASQGISSWLAWYQQKPGKAPKLLIYDASSLQSGVPSRFSGSGSGTDFTLTISSLQPEDFATYYCQQANSFPPTFGPGTKVDIK

SEQ ID NO: 1410 - protein, 106 aa, Homo sapiens
EIVLTQSPAILSLSPGERATLSCRASQSVSSYLAWYQQKPGQAPRLLIYDTSNRATGIPARFSGSGSGTDFTLTISSLEPEDFAFYYCQQRGNWWTFAQGTKVEIK

SEQ ID NO: 1411 - protein, 109 aa, Homo sapiens; identical to SEQ ID NO: 1392

SEQ ID NO: 1412 - protein, 108 aa, Homo sapiens
EIVMTQSPATLSVSPGERATLSCRASQSVSNNLAWYQHKPGQAPRLLIYGASTRATGIPARFSGSGSGTEFTLTISSLQSEDFAVYFCQQCYNWPPWTFGQGTKVEIK

SEQ ID NO: 1413 - protein, 109 aa, Homo sapiens
EIVLTQSPATLSLSPGERATLSCRASQSVSSYLAWYQQKPGQAPRLLIYDASNRATGIPARFSGSGSGTDFTLTISSLDPEDFAVYYCHKRSNWPPSLTFGGGTKVEIK

SEQ ID NO: 1414 - protein, 113 aa, Homo sapiens
DIVMTQSPDSLAVSLGERATINCKSSQSVLYSSNNKNSLAWYQQKPGQPPKLLIYWASTRESGVPDRFSGSGSGTDFTLTISSLQAEDVAVYYCQQYYSISWTFGQGTKVEIK

SEQ ID NO: 1415 - protein, 111 aa, Homo sapiens
QSALTQPASVSGSPGQSITISCTGTSSDVGSYNLVSWYQQHAGKAPKLMIYEVIKRPSGVSNRFSGSKSGNTASLTISGLQAEDEADYYCCSYAVSTTYVIFGGGTKLTVL

SEQ ID NO: 1416 - protein, 113 aa, Homo sapiens
DIVMTQSPDSLAVSLGERATINCKSSQSVLHSSNNKDSLVWYQQKPGQPPKLLIYWASSRESGVPDRFSGSGSGTDFTLTISSLQAEDVAVYYCQQYYSTPWTFGQGTKVEIK

SEQ ID NO: 1417 - protein, 117 aa, Homo sapiens
QPVLTQPPSASASLGASVTLTCTLSSGYSNYKVDWYQQRPGKGPRFVMRVGTGGIVGSKGDGIPDRFSVLGSGLNRYLTIKNIQEEDESDYHCGADHGSGSNFVFVVFGGGTKLTVL

SEQ ID NO: 1418 - protein, 112 aa, Homo sapiens
DIVMTQSPLSLPVTPGEPASISCRSSQSLLHSNGYNYLDWYLQKPGQSPQFLIYLGSNRASGVPDRFSGSGSGTDFILKISRVEAEDVGVYYCMQALQTPFTFGPGTKVDIK

SEQ ID NO: 1419 - protein, 108 aa, Homo sapiens
EIVMTQSPATLSVSPGERATLSCRASQSVSSNLAWYQQKPGQAPRLLIYGASTRATGIPARFSGSGSGTEFTLTISSLQSEDFAVYYCQQYNYWPPLTFGGGTKVEIK

SEQ ID NO: 1420 - protein, 109 aa, Homo sapiens; identical to SEQ ID NO: 1359

SEQ ID NO: 1421 - protein, 107 aa, Homo sapiens
DIQMTQSPSTLSASVGDRVTITCRASHSISSWLAWYQQKPGKAPKLLIYKASSLESGVPSRFSGSGSGTEFTLTISSLQPDDFATYYCQQYNTYSQTFGQGTKVEIK

SEQ ID NO: 1422 - protein, 107 aa, Homo sapiens
FYELTQPPSVSVSPGQTAGITCSGDKLGHKYAYWYQQKPGQSPILLIYQDDKRPSGIPERFSGSNSGTIATLTISGTQPVDEADYYCQAWDNDAGVVFGGGTKLTVL

SEQ ID NO: 1423 - protein, 107 aa, Homo sapiens
DIQMTQSPSSLSASVGDRVTITCRASQGISNYLAWFQQKPGKAPKSLIYAASSLQSGVPSKFSGSGSGTDFTLTISSLQPEDVATYYCQQYNSHPPTFGGGTKVEIK

SEQ ID NO: 1424 - protein, 110 aa, Homo sapiens
QSALTQPPSASGSPGQSVTISCTGTSSDVGTYNYVSWYQQHPGKAPKLMIYEVSKRPSGVPDRFSGSKSGNTASLTVSGLQAEDEAEYYCSAYAGSNNLVFGGGTKLTVL

SEQ ID NO: 1425 - protein, 117 aa, Homo sapiens; identical to SEQ ID NO: 1382

SEQ ID NO: 1426 - protein, 108 aa, Homo sapiens
QSALTQPASVSGSHGQSITISCTGTSSDVGSYNLVSWYQQHPGKAPKLMIYEVSKRPSGVSNRFSGSTSGNTASLTISGLQAEDEADYYCCSYAGIVLFGGGTKVTVL

SEQ ID NO: 1427 - protein, 108 aa, Homo sapiens
SYELTQPPSVSVSPGQTTRITCSGDALPKQYGYWYQQKAGQAPILVIYKDSERPSGIPERFSGSSSGTTVTLTISGVQAEDEAHYYCQSGDSSGTYVVFGGGTKLTVL

SEQ ID NO: 1428 - protein, 110 aa, Homo sapiens
SYELTQPPSVSVSPGQTARITCSGDALSKQYAYWYQQKPGQAPVLVIYKDSERPSGIPERFSGSSSGTTVTLTISGVQAEDEADYYCQSVDRSGTYFNWVFGGGTKLTVL

SEQ ID NO: 1429 - protein, 107 aa, Homo sapiens; identical to SEQ ID NO: 1407

SEQ ID NO: 1430 - protein, 109 aa, Homo sapiens
QTVVTQEPSLTVSPGGTVTLTCASSAGAVTSGYYPNWFQQKPGQAPRALIYSTANKHSWTLARFSGSLLGGKAALTLSGVQPEDEAEYYCLLYYGGAWVFGGGTKLTVL

SEQ ID NO: 1431 - protein, 112 aa, Homo sapiens
NFMLTQPHSVSESPGKTVTISCTGSSGSIASNYVQWYQQRPGSAPTTVIYEDNQRPSGVPDRFSGSIDSSSNSASLTISGLMTEDEADYYCQSYDGSNHAVVFGGGTKLTVL

SEQ ID NO: 1432 - protein, 108 aa, Homo sapiens
SYVLTQPPSVSVAPGKTARITCGGNNIGSKNVHWYQQKPGQAPVVVVYDDSDRPSGIPERFSGSNSGNTATLTISRVEAGDEADYYCQVWDSSSDPVVFGGGTKLTVL

SEQ ID NO: 1433 - protein, 112 aa, Homo sapiens
NIVMTQSPLSLPVTPGEPASISCRSSQSLLNSNGLTYLDWYLQKPGQSPQLLIYFVSNRASGVSDRFSGSGSGADFTLTISRVEAEDVGVYYCMQALQTPQTFGQGTKVEIK

SEQ ID NO: 1434 - protein, 107 aa, Homo sapiens
EIVLTQSPGTLSLSPGERATLSCGASQSISSSYLAWYQQKPGQAPRLLIYGASSRAAGIPDRFSGSGSGTDFTLTISRLEPEDFAVYFCQQYGGSLTFGGGTKVEIK

SEQ ID NO: 1435 - protein, 106 aa, Homo sapiens
SYELTQPPSVSVSPGQTASITCSGDKMGDKYACWYQQKPGQSPVVVIYEDNKRPSGIPERFSGSNSGNTATLTISGTQAMDEADYYCQAWDSSLVVFGGGTKLTVL

SEQ ID NO: 1436 - protein, 110 aa, Homo sapiens
QSALTQPPSVSGSPGQSVTISCTGTSSDVGSYNRVSWYQQPPGTAPKLMIYEVSNRPSGVPDRFSGSKSGNTASLTISGLQAEDEADYYCSSYTSSSLRVFGGGTKLTVL

SEQ ID NO: 1437 - protein, 107 aa, Homo sapiens; identical to SEQ ID NO: 1384

SEQ ID NO: 1438 - protein, 110 aa, Homo sapiens
QSALTQPRSVSGSPGQSVTISCTGTSSDVGGYNYVSWYQQHPGKAPKLMIYDVTKRPSGVPERFSGSKSGNTASLTISGLQAEDEADYSCCSYAGSYTYVFGTGTKVTVL

SEQ ID NO: 1439 - protein, 111 aa, Homo sapiens
QSALTQPASVSGSPGQSITISCTGTGSDVGGSNYVSWYQQHPGKAPKLMIYDVSNRPSGVSNRFSGSKSGNTASLTISGLQAEDEADYYCSSYTSSSTLVLFGGGTKLSVL

SEQ ID NO: 1440 - protein, 109 aa, Homo sapiens
EIVLTQSPATLSLSPGERATLSCRASQSVSSFLAWYQQKPGQAPRLLIYDASNRATGIPARFSGSGSGTDFTLTISSLEPEDFAVYYCQQRSNWPPSYTFGQGTKLEIK

SEQ ID NO: 1441 - protein, 110 aa, Homo sapiens
QSALTQPASVSGSPGQSITISCTGTSSDIGGYNYVSWYQQHPGKAPKLMIYDVSNRPSGVSNRFSGSKSGNTASLTISGLQAEDEADYYCSSYTSISTWVFGGGTKVTVL

SEQ ID NO: 1442 - protein, 108 aa, Homo sapiens
SYELTQPSSVSVSPGQTARITCSGDALPKRYAYWYRQKSGQAPVLVIHEDSKRPSGIPERFSGSTSGTMATLTITGAQLEDEADYYCFSMDSSGDLRVFGGGTKLTVL

SEQ ID NO: 1443 - protein, 108 aa, Homo sapiens
DIQMTQSPSSLSASVGDRVTITCRASQSISTYLNWYQQKPGKAPKLLIYAASSLQSGVPSRFSGSGSGTDFTLTISSLQPEDYATYYCQQSYSTPGLTFGGGTKVEIK

SEQ ID NO: 1444 - protein, 110 aa, Homo sapiens
QSALTQPASVSGSPGQSITISCTGTSSDVVGYNYVSWYQQHPGKAPKLMIYDVRNRPSGVSNRFSGSKSGNTASLTISGLQAEDEADYFCISYTSSRTLVFGGGTKLTVL

SEQ ID NO: 1445 - protein, 109 aa, Homo sapiens
SYVLTQPPSVSVAPGKTARITCGGNNIGSKNVHWYQQKPGQAPVLVVYDDSDRPSGIPERFSGSNSGNTATLTISRVEAGDEADYYCQVWDSSYYHPVVFGGGTKLTVL

SEQ ID NO: 1446 - protein, 110 aa, Homo sapiens; identical to SEQ ID NO: 1360

SEQ ID NO: 1447 - protein, 110 aa, Homo sapiens
QSVLTQPPSVSAAPGQKVTISCSGSSSNIGNNYISWYQQLPGTAPKLLIYDNNKRPSGIPDRFSGSKSGTSATLGITGLQTGDEADYYCGTWDSSLSAVVFGGGTKLTVL

SEQ ID NO: 1448 - protein, 107 aa, Homo sapiens
DIQMTQSPSTLSASVGDRVTITCRASQSINSWLAWYQQKPGKAPKLLIYKASSLESGVPSRFSGSGSGTEFTLTISSLQPDDFATYYCQQYSIYSWTFGQGTKVEIK

SEQ ID NO: 1449 - protein, 107 aa, Homo sapiens
DIQMTQSPSSLSACVGDRVTITCRASQSISSYLNWYQQKPGKGPKLLIYAASSLQSGVPSRFSGSGSGTDFTLTISSLQPEDFATYYCQQSYSTPWTFGQGTKVEIK

SEQ ID NO: 1450 - protein, 107 aa, Homo sapiens
DIQMTQSPSSVSASVGDRVTITCRASQGISSWLAWYQQKPGKAPKLLIYAASSLQRGVPSRFSGSGSGTDFTLTISSLQPEDFATYYCQQANSLPLTFGGGTKVEVK

SEQ ID NO: 1451 - protein, 110 aa, Homo sapiens
QSVLTQPPSASGTPGQRVTISCSGSSSNIESNSVNWYQQLPGTAPKLLIYSNNQRPSGVPDRFSGSKSGTSASLAISGLQSEDEADYYCAAWDDSLNGVVFGGGTKLTVL

SEQ ID NO: 1452 - protein, 110 aa, Homo sapiens
QSVLTQPPSASGTPGQRVTISCSGSTSNIGSNTVNWYQQLPGTAPKLLIYSNNQRPSGVPDRFSGSKSGPSASLAISGLQSVDEADYYCAAWDDSLNGWVFGGGTKLTVL

SEQ ID NO: 1453 - protein, 106 aa, Homo sapiens
SYELTQSPSVSVSPGQTASITCSGDKLGDKYACWYQQRPGQSPVLVIYQDSQRPSGIPERFSGSNSGNTATLTISGTQAMDEADYYCQAWDSSTAVFGGGTKLTVL

SEQ ID NO: 1454 - protein, 107 aa, Homo sapiens; identical to SEQ ID NO: 1371

SEQ ID NO: 1455 - protein, 106 aa, Homo sapiens
DIQMTQSPSSLSASVGDRVTITCRASQSISTYLNWYQQKPGKAPKLLIYAASSLQSGVPSRFSGSGSGTDFTLTISSLQPEDFATYHCQQSYSTLTFGGGTKVEIK

SEQ ID NO: 1456 - protein, 109 aa, Homo sapiens
EIVLTQSPATLSLSPGERATLSCRASQSVSSYLAWYQQKPGQAPRLLIYDASNRATGIPARFSGSGSGTDFTLTISSLEPEDFAVYYCQHRSNWPPRLTFGGGTKVEIK

SEQ ID NO: 1457 - protein, 107 aa, Homo sapiens; identical to SEQ ID NO: 1357

SEQ ID NO: 1458 - protein, 107 aa, Homo sapiens
EIVLTQSPGTLSLSPGERATLSCRASQSVSSSYLAWYQQKPGQAPRLLIYGASSRATGIPDRFSGSGSGTDFTLTISRLEPEDFAVYYCQQYGSSYTFGQGTKLEIK

SEQ ID NO: 1459 - protein, 107 aa, Homo sapiens; identical to SEQ ID NO: 1396

SEQ ID NO: 1460 - protein, 110 aa, Homo sapiens
QSVLTQPPSASGTPGQRVTISCSGSSSNIGSNYVYWYQQLPGTAPKLLISRNNQRPSGVPDRFSGSKSGTSASLAISGLRSEDEADYYCAAWDDSLSSWVFGGGTKLTVL

SEQ ID NO: 1461 - protein, 110 aa, Homo sapiens; identical to SEQ ID NO: 1378

SEQ ID NO: 1462 - protein, 106 aa, Homo sapiens
SYELTQPPSVSVSPGQTASITCSGDKLGDKYSSWYQQKPGQSPVLVIYEDTKRPSGIPERFSGSNSGNTATLTISGTQAMDEADYYCQAWSSSTAVFGGGTKLTVL

SEQ ID NO: 1463 - protein, 111 aa, Homo sapiens
QSALTQPASVSGSPGQSITISCTGTSSDVGGYNYVSWYQQHPGKAPKLMIYYVSNRPSGVSNRFSGSKSGNTASLTISGLQAEDEADYYCSSYTSSTLNVLFGGGTKLTVL

SEQ ID NO: 1464 - protein, 107 aa, Homo sapiens
DIQMTQSPSSLSASVGDRVTITCRARQSISNYLNWYQQKPGKAPKLLIYAASSLHSGVPSRFSGSGSGTDFTLTISSLQPEDFATYYCQQSYSTPGTFGQGTRLEIK

SEQ ID NO: 1465 - protein, 112 aa, Homo sapiens
QSVLTQPPSVSGAPGQRVTISCTGSSSNIGAGYDVHWYQHLPGTAPKLLIYGNSNRPSGVPDRFSGSKSGTSASLAITGLQAEDEADYYCQSYDSSLSGWSVFGTGTKVTVL

SEQ ID NO: 1466 - protein, 112 aa, Homo sapiens; identical to SEQ ID NO: 1385

SEQ ID NO: 1467 - protein, 108 aa, Homo sapiens
DIQMTQSPSSLSASVGDRVTITCRASQSISIYLNWYQQKPGKAPKLLIYAASTLQSGVPSRFSGSGSGTDFTLTISSLQPEDFATYYCQQSYSTHMSTFGQGTKLEIK

SEQ ID NO: 1468 - protein, 110 aa, Homo sapiens
DIVVTQTPLSLSVTPGQPASISCKSSETLLHSDGKTYLSWYLQKPGQPPQLLIYEVSNRFSGVPDRFSGSGSGTDFTLKIGRVEAEDVGLYYCMQSIQLAFGQGTRLEIE

SEQ ID NO: 1469 - protein, 108 aa, Homo sapiens; identical to SEQ ID NO: 1419

SEQ ID NO: 1470 - protein, 109 aa, Homo sapiens
SSELTQDPAVSVALGQTVTITCQGDSLRSHYASWYKVKPGQAPLLVIYGRNNRPSGIPDRFSGSRSGNTASLTITGAQVDDEADYYCSSGDSSTDHHVVFAGGTKLAVV

SEQ ID NO: 1471 - protein, 107 aa, Homo sapiens
DMEVTQFPSSLSASIGDRVTITCRATQSISTYLNWYQQKPGKAPNLLIYSASHLQRGVPARFSGSGSGTEFTLTITTLQPEDVGTYYCHQSYGVPITFGGGTKVDIK

SEQ ID NO: 1472 - protein, 109 aa, Homo sapiens
EIVMTQSPATLSVSPGERATLSCRASQSVSSNLAWYQQKPGQAPRLLIYGASTRATGIPARFSGSGSGTEFTLTISSLQSEDFAVYYCQQYNNWPPMYTFGQGTKLEIK

SEQ ID NO: 1473 - protein, 111 aa, Homo sapiens
NFMLTQPHSVSESPGKTVTISCTGSSGSIASNYVQWYQQRPGSAPTTVIYEDNQRPSGVPDRFSGSIDSSSNSASLTISGLKTEDEADYYCQSYDSSKYVVFGGGTKLTVL

SEQ ID NO: 1474 - protein, 108 aa, Homo sapiens; identical to SEQ ID NO: 1363

SEQ ID NO: 1475 - protein, 113 aa, Homo sapiens
DIVMTQSPLSLPVTPGEPASISCRSSQSLLHSNGYNYLDWYLQKPGQSPQLLIYLGSTRASGVPDRFSGSGSGTDFTLKISRVEAEDVGVYYCMQALQTPLYTFGQGTKLEIK

SEQ ID NO: 1476 - protein, 108 aa, Homo sapiens; identical to SEQ ID NO: 1374

SEQ ID NO: 1477 - protein, 109 aa, Homo sapiens; identical to SEQ ID NO: 1413

SEQ ID NO: 1478 - protein, 108 aa, Homo sapiens
SNELTQPPSVSVSPGQTARITCSGDALPKQYAYWYQQKPGQAPVLVIYKDTERPSGIPERFSGSSSGTTVTLTISGVQAEDEADYYCQSTASSGTYVVFGGGTKLTVL

SEQ ID NO: 1479 - protein, 107 aa, Homo sapiens
DIQMTQSPSTLSASVGDRVTITCRASQSISSWLAWYQQKPGKAPKLLIYKASSLESGVPSRFSGSGSGTEFTLTISSLQPDDFATYYCQQYNSYSPTFGQGTKVEIK

SEQ ID NO: 1480 - protein, 112 aa, Homo sapiens; identical to SEQ ID NO: 1381

SEQ ID NO: 1481 - protein, 107 aa, Homo sapiens
EIVMTQSPATLSVSPGERATLSCRASQSVSSNLAWYQQKPGQAPRLLIYGASTRATGIPARFSGSGSGTEFTLTISSLQSEDFAVYYCQQYNNWPGTFGQGTKVEIK

SEQ ID NO: 1482 - protein, 109 aa, Homo sapiens
EIVLTQSPGTLSLSPGERATLSCRASQSVSSSYLAWYQQKPGQAPRLLIYGASSRATGIPDRFSGSGSGTDFTLTISRLEPEDFAVYYCQQYGSSPPYTFGQGTKLEIK

SEQ ID NO: 1483 - protein, 117 aa, Homo sapiens
QPVLTQPPSASASLGASVTLTCTLSSGYSNYKVDWFQQRPGKGPRFVMRVGTGGIVGSKGDGIPDRFSVLGSGLNRYLTIKNIQEEDESDYHCGADHGSGSNFVYVVFGGGTKLTVL

SEQ ID NO: 1484 - protein, 109 aa, Homo sapiens
EVVLTQSPGTLSLSPGERATLSCRASQSVSSSYLAWYQQKPGQAPRLLIYGASSRATGIPDRFSGSGSGTDFTLTISRLEPEDFAVYHCQHFGSSSQWTFGQGTKVEIK

SEQ ID NO: 1485 - protein, 109 aa, Homo sapiens
QTVVTQEPSLTVSPGGTVTLTCASSTGAVTSGYFPNWFQQKPGQAPRALIFSTNNRHSWTPARFSGSLLGDKAALTLSGVQPEDEAEYYCLLYYGGPWVFGGGTKLTVL

SEQ ID NO: 1486 - protein, 107 aa, Homo sapiens
EIVMTQSPGTLSVSPGERATLSCRASQTLSSNLAWYQQKPGQAPRLLIYGASTRATGIPARFSGSGSGTEFTLTISSLQSEDFAVYHCQQYNNWPLAFGQGTKVEIK

SEQ ID NO: 1487 - protein, 111 aa, Homo sapiens
QSALTQPASVSGSPGQSITISCTGTSSDIGSYNLVSWYQQYPGKAPKLMIYEVSKRPSGVSNRFSGSKSGNTASLTISGLQAEDEADYYCCSYAGGNTFVVFGGGTKLTVL

SEQ ID NO: 1488 - protein, 107 aa, Homo sapiens
EIVMTQSPATLSVSPGERATLSCRASQSVSSNLAWYQQKPGQAPRLLIYGASTRATGIPARFSGSGSGTEFTLTISSLQSEDFAVYYCQQYNNWPRTFGQGNRVEIN

SEQ ID NO: 1489 - protein, 111 aa, Homo sapiens
QSALTQPASVSGSPGQSITISCTGTSSDVGGYNYVSWYQQHPGKAPKLMIYDVSNRPSGVSNRFSGSRSGNTASLTISGLQAEDEADYYCSSYTSSSTPVVFGGGTKLTVL

SEQ ID NO: 1490 - protein, 112 aa, Homo sapiens
DIVMTQSPLSLPVTPGEPASISCRSSQSLLHSNGYNYLDWYLQKPGQSPHLLIYLGSNRASGVPDRFSGSGSGTDFTLKISRVEAEDVGVYYCMQALQTPRTFGQGTKVEIK

SEQ ID NO: 1491 - protein, 107 aa, Homo sapiens; identical to SEQ ID NO: 1370

SEQ ID NO: 1492 - protein, 110 aa, Homo sapiens; identical to SEQ ID NO: 1369

SEQ ID NO: 1493 - protein, 108 aa, Homo sapiens; identical to SEQ ID NO: 1412

SEQ ID NO: 1494 - protein, 106 aa, Homo sapiens; identical to SEQ ID NO: 1393

SEQ ID NO: 1495 - protein, 107 aa, Homo sapiens
DIQMTQSPSSLSASVGDRVTITCQASQDISKYLNWYQQKPGKAPKLLIYDASNLERGVPSRFSGSGSGTDFTFTISSLQAEDIATYYCQQYHNLPRTFGQGTKVEIK

SEQ ID NO: 1496 - protein, 107 aa, Homo sapiens
DIQLTQSPSFLSASVRDRVTITCRASQGISSYLAWYQQKPGKAPKLLIYAASTLQSGVPSRFSGSGSGTEFTLTISSLQPEDFATYYCQQLNSYPFTFGPGTKVDIK

SEQ ID NO: 1497 - protein, 113 aa, Homo sapiens; identical to SEQ ID NO: 1414

SEQ ID NO: 1498 - protein, 111 aa, Homo sapiens
QSALTQPASVSGSPGQSITISCTGTSSDVGGYNYVSWYQQHPGKAPKLMIYDVGNRPSGVSNRFSGSKSGNTASLTISGLQAEDEADYYCSSYTSSSTLYVFGTGTKVTVL

SEQ ID NO: 1499 - protein, 107 aa, Homo sapiens
DIQMTQSPSSLSASVGDRVTFTCRASQGISNYLAWYQQKPGKVPKLLIYAASTLQSGVPSRFSGIGSGTDFTLTISSLQPEDVATYYCQKYNSAPWTFGQGTKVEIK

SEQ ID NO: 1500 - protein, 106 aa, Homo sapiens
SYELTQPPSVSVSPGQTASITCSGDKLGDKFVCWYQQKPGQSPVLVIYQDNKRPSGIPERFSGSNSGNTATLTISGTQALDEADYYCQAWDSSTGVFGGGTKLTVL

SEQ ID NO: 1501 - protein, 107 aa, Homo sapiens
DIQLTQSPSFLSASVGDRVTITCRASQGISSYLAWYQQKPGKAPKLLMYAASTLQSGVPSRFSGSGSGTEFTLTINTLQPEDFATYYCQQLNSYPITFGQGTRLEIK

SEQ ID NO: 1502 - protein, 110 aa, Homo sapiens
QSVLTQPPSASGTPGQRVTFSCSGSNSNIGSYTVNWYQQLPGTAPKLLIYDNNQRPSGVPDRFSGSKSGTSASLAISGLQSEDEADYYCAVWDDSLNGLVFGGGTKLTVL

SEQ ID NO: 1503 - protein, 110 aa, Homo sapiens
QSVLTQPPSVSEAPRQRVTISCSGSSSNIGNNAVNWYQQLPGKAPKLLIYYDDLLPSGVSDRFSGSKSGTSASLAISGLQSEDEADYYCAAWDDSLNGVVFGGGTKLTVL

SEQ ID NO: 1504 - protein, 107 aa, Homo sapiens
DIQMTQSPSSLSASVGDRVTITCRASQSITSYLNWYQQRPGKAPKLLIYAASSLQSGVPSRFSGSGSGTDFTLSISSLQPEDFATYYCQQSYTTLLTFGGGTKVEIK

SEQ ID NO: 1505 - protein, 111 aa, Homo sapiens
QSALTQPASVSGSPGQSITISCTGTSSDVGGYNFVSWHQQHPGKAPKNMIYDVSKRPSGVSNRFSGSKSGNTASLTISGLHTEDEADYYCSSYTSTSTPWVFGGGTKLTVL

SEQ ID NO: 1506 - protein, 108 aa, Homo sapiens
EIVMTQSPGTLSVSPGERATLSCRASQSLSSHLAWYQQKPGQAPRLLIYGVSTRATGIPARFSGSGSGTEFTLAISSLQSEDSAVYYCQQYHVWPPITFGQGTRLEIK

SEQ ID NO: 1507 - protein, 113 aa, Homo sapiens
DIVMTQSPDSLAVSLGERATINCKSSQSVLYSSNNKNYLAWYQQKPGQPPKLLIYWASTRESGVPDRFSGSGSGTDFTLTISSLQAEDVAVYYCQQYYSTPLTFGQGTKVEIK

SEQ ID NO: 1508 - protein, 107 aa, Homo sapiens
DIQMTQSPSSVSASVGDRVTITCRASQGISSWLAWYQQKPGKAPKLLIYAASSLQSGVPSRFSGSGSGTDFTLTITSLQPEDFATYYCQQGNSFPLTFGGGTKVEIK

SEQ ID NO: 1509 - protein, 111 aa, Homo sapiens
QSVLTQPPSVSGAPGQRVTISCTGSSSNIGAGYDVHWYQQIPGTAPKLLFYGNNNRPSGVPDRFSDSKSGTSASLAITGLQAEDEADYYCQSYDSSLSAWVFGGGTKLTVL

SEQ ID NO: 1510 - protein, 107 aa, Homo sapiens; identical to SEQ ID NO: 1421

SEQ ID NO: 1511 - protein, 109 aa, Homo sapiens
EIVLTQSPATLSLSPGERATLSCRASQSVSSYLAWYQQKPGQAPRLLIYDASNRATGIPARFSGSGSGTDFTLTISSLEPEDFAVYYCQQRSNWPPGVTFGQGTRLEIK

SEQ ID NO: 1512 - protein, 107 aa, Homo sapiens
DIQMTQSPSSLSASVGDRVTITCQASQDIRNYLNWYQQKPGKAPELLIYDASNLETGVPSRFSGSGSGTDFIFTISSLQPEDIATYYCHQYDYLPYTFGQGTKLDIK

SEQ ID NO: 1513 - protein, 108 aa, Homo sapiens
DIQMTQSPSSLSASVGDRVTITCRASQSISSYLNWYQQKPGKAPKLLIYAATSLQSGVPSRFSGSGSGTDFTLTISSLQPEDFATYYCQQTYSTPLYTFGQGTKLEIK

SEQ ID NO: 1514 - protein, 109 aa, Homo sapiens; identical to SEQ ID NO: 1392

SEQ ID NO: 1515 - protein, 108 aa, Homo sapiens
SYELTQPPSVSVSPGQTARITCSGDALPNQYAYWYQQKPGQAPVLVMCKDSERPSGIPERFSGSSSGTTVTLTISGVQAEDEADYYCQSADSSGTYVVFGGGTKLTVL

SEQ ID NO: 1516 - protein, 107 aa, Homo sapiens; identical to SEQ ID NO: 1394

SEQ ID NO: 1517 - protein, 117 aa, Homo sapiens; identical to SEQ ID NO: 1417

SEQ ID NO: 1518 - protein, 113 aa, Homo sapiens
DIVMTQSPDSLAVSLGERATINCKSSQSLLYTSNNKNYLAWYQQKPGQPPKLLIYWASTRESGVPDRFSGSGSGTDFTLTISSLQAEDVAVYYCQQYYSPPWTFGQGTKVEIK

SEQ ID NO: 1519 - protein, 108 aa, Homo sapiens
DIQMTQSPSSLSASVGDRVTITCQASQDISNYLHWYQQKPGKAPKLLIYDASNLETGVPSRFSGSGSGTDFTFTISSLQPEDIATYYCQQYHNLPPITFGQGTRLEIK

SEQ ID NO: 1520 - protein, 107 aa, Homo sapiens
SYELTQPPSVSVSPGQTASITCSGDKLGETYVSWYQQKPGQSPVLVIYEDSKRPSGIPERFSGSNSGNTATLTISGTQAMDEADYYCQAWDSSTGGVFGTGTKVTVL

SEQ ID NO: 1521 - protein, 111 aa, Homo sapiens
DIQMTQSPSSLSASVGDRVTITCQASLDISKYLNWYQHKPGKAPNLLIYDAFNLERGVPSRFSGSGSGTDFTFTISSLQPEDIATYYCQQYDNLPPGVSTTFGQGTRLEIK

SEQ ID NO: 1522 - protein, 108 aa, Homo sapiens
SYELTQPPSVSVSPGQTARITCSGDALPKKYAHWYQQKSGQAPVLVIYEDSKRPSGIPERFSGSSSGTMATLTISGAQVEDEADYYCCSTDSSGNQRVFGGGTKLTVL

SEQ ID NO: 1523 - protein, 111 aa, Homo sapiens; identical to SEQ ID NO: 1401

SEQ ID NO: 1524 - protein, 108 aa, Homo sapiens
SYELTQPPSVSVSPGQTARITCSGDALPRQYTYWYQQKPGQAPVLVIYKDSERPSGIPERFSGSSSGTTVTLTISGVQAEDEADYYCQSADTIGTYWVFGGGTKLTVL

SEQ ID NO: 1525 - protein, 109 aa, Homo sapiens
EIVMTQSPATVSVSPGERATLSCRASQSVSSNLAWYQQKPGQAPRLLIYGASTRATGIPARFSASGSGTEFTLTISSLQSEDFAVYYCQQYNNWPPMYTFGQGTKVEIK

SEQ ID NO: 1526 - protein, 108 aa, Homo sapiens; identical to SEQ ID NO: 1388

SEQ ID NO: 1527 - protein, 108 aa, Homo sapiens
DIQMTQSPSSLSASVGDRVTITCRASQSISSYLNWYQQKPGKAPKLLIYAASSLKSGVPSRFGGSGSGTDFTLTISSLQPEDFATYYCQQSYEMPPWTFGQGTKVEIE

SEQ ID NO: 1528 - protein, 106 aa, Homo sapiens
SYELTQPPSVSVSPGQTARITCSGDALPNQYAYWYHQKPGQAPVVVIYKDSERPSGIPQRFSGSSSGTTVTLTISGVQAEDEADYYCQSADSSGYVFGTGTKVTVL

SEQ ID NO: 1529 - protein, 111 aa, Homo sapiens
QSALTQPASVSGSPGQSITISCTGTSSDVGGYNYVSWYQQHPGKAPKLMIYDVSKRPSGVSNRFSGSKSGNTASLTISGLQAEDEADYYCSSYTSSSIPYVFGTGTKVTVL

SEQ ID NO: 1530 - protein, 106 aa, Homo sapiens; identical to SEQ ID NO: 1410

SEQ ID NO: 1531 - protein, 108 aa, Homo sapiens
SYELTQPPSVSVSPRQTARITCSGDALPKKYAYWYQQKSGQAPVLVIYEDSKRPSGIPERFSGSSSGTMATLTISGAQVEDEADYYCYSTDTSGNHWVFGGGTKLTVL

SEQ ID NO: 1532 - protein, 108 aa, Homo sapiens
SYELTQPPSVSVSPGQTARITCSGDALPKKYAYWYQQKSGQAPVLVISEDSKRPSGIPERFSGSSSGTVATLTISGAQVEDEADYYCYSTDSSGNHRVFGGGTKLTVL

SEQ ID NO: 1533 - protein, 108 aa, Homo sapiens
EIVLTQSPGTLSLSPGERATLSCRASQSVSSTFLAWYQQKPGQAPRLLIFGASSRATGIPDRFSGSGSGTDFTLTISRLEPEDFAVYYCHQYGTSPYTFGQGTKLEIK

SEQ ID NO: 1534 - protein, 106 aa, Homo sapiens
EIVMTQSPATLSVSPGERVTLSCRASQSVSSNLAWYQQKPGQAPRLLIYGASTRATGIPARFSGGGSGTEFTLTISSLQSEDFAVYYCQQYNNFLTFGGGTKVEIK

SEQ ID NO: 1535 - protein, 112 aa, Homo sapiens
DIVMTQSPDSLAVSLGERATINCKSSQSVLYSSNNKNYLAWYQQKPGQPPKLLIYWASTRESGVPDRFSGSGSGTDFTLTISSLQAEDVAVYYCQQYYSTPGFGQGTKLEIK

SEQ ID NO: 1536 - protein, 111 aa, Homo sapiens; identical to SEQ ID NO: 1364

SEQ ID NO: 1537 - protein, 108 aa, Homo sapiens
SYELTQPPSVSVSPGQTARITCSGDALPNQYAYWYQQKPGQAPVLVIYKDSERPSGIPERFSGSSSGTTVTLTISGVQAEDEADYYCQSADSSGTSWVFGGGTKLTVL

SEQ ID NO: 1538 - protein, 108 aa, Homo sapiens
EIVLTQSPGTLSLSPGERASLSCRASQSVSSSYLAWYQQKPGQAPRLLIYGASSRATGIPDRFSGSGSGTDFTLTISRLEPEDFAVYYCQQYGSSPFTFGGGTKVEIK

SEQ ID NO: 1539 - protein, 107 aa, Homo sapiens
DIQMTQSPSTLSASVGDRVTITCRASQSISSWLAWYQQKPRKAPKLLIYKASTLESGVPSRFSGSGSGTEFTLTISSLQPDDFATYYCQQYNSYSLTFGGGTKVEIK

SEQ ID NO: 1540 - protein, 107 aa, Homo sapiens
EIVLTQSPATLSVSPGERATLSCRASQSVSSNLAWYQQKPGQAPRLLIYGASTRATGIPARFSGSGSGTDFTLTISSLQSEDFALYYCQQYNNWWRTFGQGTKVEIN

SEQ ID NO: 1541 - protein, 108 aa, Homo sapiens
SYELTQPPSVSVSPGQTARITCSGDALPKKYAYWYQQKSGQAPVLVIYEDSKRPSGIPERFSGSSSGTMATLTISGAQVEDEADYYCYSTDSSGNHWVFGGGTKLTVL

SEQ ID NO: 1542 - protein, 108 aa, Homo sapiens
SSELTQDPAVSVALGQTVRITCQGDSLRSYYASWYQQKPGQAPLLVIYGKNNRPSGIPDRFSGSSSGNTPSLTITGAQAEDEADYYCNFRDSSGHHPVFGEGTKLTVL

SEQ ID NO: 1543 - protein, 110 aa, Homo sapiens; identical to SEQ ID NO: 1356

SEQ ID NO: 1544 - protein, 107 aa, Homo sapiens; identical to SEQ ID NO: 1481

SEQ ID NO: 1545 - protein, 106 aa, Homo sapiens
SYELTQPSSVSVSPGQTARITCSGDVLAKNYARWFQQKPGQAPVLVIYKDSERPSGIPKRFSGSSSGTTVTLTISGAQVEDEADYYCYSAADNNRVFGGGTKLTVL

SEQ ID NO: 1546 - protein, 108 aa, Homo sapiens; identical to SEQ ID NO: 1366

SEQ ID NO: 1547 - protein, 108 aa, Homo sapiens
DIQMTQSPSSLSASVGDRVTITCQASQDISNSLSWYQQKPGKAPKLLIYDASNLKTGVPSRFSGSGSGTDFTFTISSLQPEDIATYYCQQYDNLLLFTFGPGTKVDIK

SEQ ID NO: 1548 - protein, 110 aa, Homo sapiens
EIVLTQSPATLSLSPGERATLSCRASQSVSSYLAWYQQKPGQAPRLLIYDASNRATGIPARFSGSGSGTDFTLTISSLEPEDFAVYYCQQRSNWPPRTWTFGQGTKVEIK

SEQ ID NO: 1549 - protein, 109 aa, Homo sapiens; identical to SEQ ID NO: 1387

SEQ ID NO: 1550 - protein, 108 aa, Homo sapiens
SSELTQDPAVSVALGQTVRITCQGDSLRSYYASWYQQKPGQVPILVIYDKNNRPSGIPDRFSGSSSGNTASLTITGAQAEDEADYYCNSRDSSGNAVVFGGGTKLTVA

SEQ ID NO: 1551 - protein, 110 aa, Homo sapiens
SSELTQDPAVSVALGQTVRITCQGDSLRSYYANWYQQKPGQAPVVVIFGKNNRPSGIPDRFSGSNSGNTASLTITGAQAEDEADYYCNSRDSSGYIWGWMFGGGTKLTVL

SEQ ID NO: 1552 - protein, 108 aa, Homo sapiens
SYVLTQPPSVSVAPGKTARITCGGNNIGSKSVHWYQQKPGQAPVVVVYDDSDRPSGLPERFSGSNSGNTATLTISRVEAGDEADYYCQVWDSSSDHWVFGGGTKLTVL

SEQ ID NO: 1553 - protein, 110 aa, Homo sapiens; identical to SEQ ID NO: 1408

SEQ ID NO: 1554 - protein, 111 aa, Homo sapiens
QLVLTQSPSASASLGASVKLTCTLSSGHTTYAIAWHQQQPEKGPRYLMKLNSDGSHTRGDGIPDRFSGSSSGAERYLTISSLQSEDEADYYCQSWDTGIGVFGGGTKLTVL

SEQ ID NO: 1555 - protein, 106 aa, Homo sapiens; identical to SEQ ID NO: 1406

SEQ ID NO: 1556 - protein, 111 aa, Homo sapiens
QSALTQPASVSGSPGQSITISCTGTSSDVGSYNLVSWYQQHPGKAPKLMIYEVSKRPSGVSNRFSGSKSGNTASLTISGLQAEDEADYYCCSYVGSSTYVVFGGGTKLTVL

SEQ ID NO: 1557 - protein, 107 aa, Homo sapiens
SYELTQPPSVSVSPGQTARITCSADALSKQYAYWYQQKPGQAPVVVIYKDSERPSGIPERFSGSSSGTTVTLTISGVQAEDEADYYCQSADSSSHWVFGGGTKLTVL

SEQ ID NO: 1558 - protein, 110 aa, Homo sapiens
NFMLTQPHSVSESPGKTVTISCTGNSGSIASNYVQWYQQRPGSAPTTVIYEDSQRPSGVPDRFSGSIDSSSNSASLTISGLKTEDEADYYCQSFDSGNVVFGGGTKLTVL

SEQ ID NO: 1559 - protein, 110 aa, Homo sapiens
QSVLTQPPSASGTPGQRVTISCSGSSSNIGSNTVNWYQQLPGTAPKLLIYNNNQRPSGVPDRLSGSKSGTSASLAISGLQSEDEADYYCVAWDDSRNGLVFGGGTKLTVL

SEQ ID NO: 1560 - protein, 112 aa, Homo sapiens
DIVMTQSPDSLAVSLGERATINCKSSQSVLYSSNNKNYLAWYQQKPGQPPKLLIYWASTRESGVPDRFSGSGSGTDFTLTISSLQAEDVAVYYCQQYYSTRTFGQGTKLEIK

SEQ ID NO: 1561 - protein, 114 aa, Homo sapiens
DIVMTQSPDSLAVSLGERATINCKSSQSVLYSSNNKNYLAWYQQKPGQPPKLLIYWASTRESGVPDRFSGSGSGTDFTLTISSLQAEDVAVYYCQQYYSTPPYTFGQGTKVEIK

SEQ ID NO: 1562 - protein, 110 aa, Homo sapiens
QSVLTQPPSASGTPGQRVTISCSGSNSNIGSYTVNWYQQFPGTAPKLLIYDNNQRTSGVPDRFSGSKSGTSASLAISGLQSEDEASYYCLAWDDSLNGLVFGGGTKLTVL

SEQ ID NO: 1563 - protein, 110 aa, Homo sapiens
QSVLTQPPSASGTPGQRVTISCSGSSSNIGSNYVYWYQQLPGTAPKLLIYSSNQRPSGVPDRFSGSKSGTSASLAISGLRSEDEADYYCAAWDASLSGWVFGGGTKLTVL

SEQ ID NO: 1564 - protein, 108 aa, Homo sapiens
SYELTQPPSVSVSPGQTARITCSADALPKHYAYWYQQRPGQAPVLVIYKDIERPSGIPERFSGSSSGTTVTLTITGAQAEDEADYYCQSVDGSGSSVVFGGGTKLAVL

SEQ ID NO: 1565 - protein, 107 aa, Homo sapiens
SYELTQPPSVSVSPGQTASITCSGDKLGDKYACWYQQKPGQSPVLVIHQDSQRPSGIPERFSGSNSGNTATLTISGTQAMDEADYYCQAWDSSTHVVFGGGTKLTVL

SEQ ID NO: 1566 - protein, 111 aa, Homo sapiens
QSALTQPASVSGSPGQSITISCTGTSSDVGGYNYVSWFQHHPDKAPRLMIYDVSKRPSGVSNRFSGSKSGNTASLTISGLQAEDEADYYCSSYTSSSTPFVFGTGTKVTVL

SEQ ID NO: 1567 - protein, 111 aa, Homo sapiens
QPVLTQSSSASASLGSSVKLTCTLSSGHSSYIIAWHQQQPGKAPRYLMKLEGSGSYNKGSGVPDRFSGSSSGADCYLTISNLQSEDEADYYCETWDSNTRVFAGGTKLTVL

SEQ ID NO: 1568 - protein, 108 aa, Homo sapiens
DIQMTQSPSSLSASVGDRVTITCRASQSISSYLNWYQQKPGKAPKLLIYAASSLQSGVPSRFSGSGSGTDFTLTISSLQPEDFATFYCQQSYSTPMHTFGQGTKLEIK

SEQ ID NO: 1569 - protein, 107 aa, Homo sapiens
DIQLTQSPSFLSASVGDRVTITCRASQGISSYLAWYQQKPGKAPKLLIYAASTLQSGVPSRFSGSGSGTEFTLTISSLQPEDFATYYCQQLNSYLGTFGQGTKVEIK

SEQ ID NO: 1570 - protein, 107 aa, Homo sapiens; identical to SEQ ID NO: 1409

SEQ ID NO: 1571 - protein, 110 aa, Homo sapiens; identical to SEQ ID NO: 1360

SEQ ID NO: 1572 - protein, 110 aa, Homo sapiens
QSALTQPASVSGSPGQSITISCTGTSSDVGSYNLVSWYQQHPGKAPKLMIYEVSKRPSGVSNRFSGSKSGNTASLTISGLQAEDEADYYCCSYAGSSTWGFGTGTKVTVL

SEQ ID NO: 1573 - protein, 109 aa, Homo sapiens
SYVLTQPPSVSVAPGKTARITCGGNNIGTKGVHWYQQKPGQAPVLVVYDDSDRPSGIPGRFSGSNSGNTATLTISRVEAGDEADYFCQVWDSSSDHHVVFGGGTKLTVL

SEQ ID NO: 1574 - protein, 112 aa, Homo sapiens
DIVMTQSPLSLPVTPGEPASISCRSSQSLLHSDGYTYLDWYLQKPGQSPQLLIYLGSKRASGVPDRFSGSGSGTDFTLKISRVEAEDVGVYYCMQALQTPLTFGGGTKVEIK

SEQ ID NO: 1575 - protein, 109 aa, Homo sapiens
EIVMTQSPGTLSVSPGERATLSCRASQSVSSNLAWYQQKPGQAPRLLIYGASTRATGVPARFSGSGSGTEFTLTISSLQSEDFAVYYCQQYNNWPPMYTFGQGTKLEIK

SEQ ID NO: 1576 - protein, 107 aa, Homo sapiens
EIVMTQSPATLSVSPGERATLSCRASQSVSSNLAWYQQKPGQAPRLLIYGASTRATGIPARFSGSGSGTEFTLTISSLQSEDFAVYYCQQYNNWPRTFGQGTKVEIK

SEQ ID NO: 1577 - protein, 107 aa, Homo sapiens
QPVVTQSPSASASLGASVKLTCTLDSGHRSYAIAWHQQRPEKGPRFLMRITTDGRHTKGDGIPDRFSGSGSGTERYLTISSLQSEDEADYYCQTWGTFGGGTRLTVL

SEQ ID NO: 1578 - protein, 112 aa, Homo sapiens
DIVMTQTPLSLSVTPGQPASISCKSSQSLLHSDGKTYLYWYLQKPGQSPQLLIYEVSNRFSGVPDRFSGSGSGTDFTLKISRVEAEDVGVYYCMQSIQPPLTFGGGTKVEIK

SEQ ID NO: 1579 - protein, 113 aa, Homo sapiens
DIVMTQSPDSLAVSLGERATINCKSSQSVLYSSNNKNYLAWYQQKPGQPPKLLIYWASTRESGVPDRFSGSGSGTDFTLTISSLQAEDVAVYYCQQYYSTPLTFGGGTKVEIK

SEQ ID NO: 1580 - protein, 111 aa, Homo sapiens
QSALTQPASVSGSPGQLITIFCNGSISDVGGWNYVSWYQQHPDKAPKMMIYDVRHRPSGVSSRFSGSKSGNTASLTISGLQAEDEGDYYCSSFTSRGALVLFGGGTKLTVL

SEQ ID NO: 1581 - protein, 108 aa, Homo sapiens
QSALTQPRSVSGSPGQSVTISCTGTSSDVGGYNYVSWYQQHPGKAPKLMIYDVSKRPSGVPDRFSGSKSGNTASLTISGLQAEDEADYYCCSYAGIWVFGGGTKLTVL

SEQ ID NO: 1582 - protein, 108 aa, Homo sapiens
EIVLTQSPGTLSLSPGERATLSCRASQSVSSSYLGWYHQKPGQAPRLLIYGASSRATGIPDRFSGSGSGTDFTLTISRLEPEDFAVYYCQHYGSSRSTFGQGTKLEIK

SEQ ID NO: 1583 - protein, 106 aa, Homo sapiens
DIQMTQSPSSLSASVGDRVTITCRARQSISNYLNWYQQKPGKAPKLLIYAASSLHSGVPSRFSGSGSGTDFTLTISSLQPEDFATYYCQQSYSTPTFGGGTKVEIK

SEQ ID NO: 1584 - protein, 107 aa, Homo sapiens
DIQMTQSPSSLSASVGDRVTITCRASQSISSYLNWYQQKPGKAPKLLIYAASSLHSGVPSRFSGSGSGTDFTLTISSLQPEDFATYYCQQSYSTPYTFGQGTKLEIK

SEQ ID NO: 1585 - protein, 109 aa, Homo sapiens
SSELTQDPAVSVALGQTVRITCQGDSLRSYYASWYQQKPRQAPVLIISGNNNRPSGIPDRFSGSSSGNTASLTITGAQAEDEADYYCNSRDSSGNHLRVFGGGTKLTVL

SEQ ID NO: 1586 - protein, 108 aa, Homo sapiens; identical to SEQ ID NO: 1405

SEQ ID NO: 1587 - protein, 108 aa, Homo sapiens
DIQMTQSPSSLSASVGDRVTITCQASQDISNYLNWYQQKPGKAPKLLIYAASNLETGVPSRFSGSGSGTDFTFTISSLQPEDIATYYCQQYDNLLQFTFGPGTKVDIK

SEQ ID NO: 1588 - protein, 106 aa, Homo sapiens
SYELTQPPSVSVSPGQTARITCSGDALPTKYAYWYQQKSGQAPVLVIYDDSKRPSGIPERFSGSSSGTMATLTISGAQVEDEADYYCYSTDSSGNVFGTGTKVTVL

SEQ ID NO: 1589 - protein, 107 aa, Homo sapiens
EIVMTQSPATLSVSAGERATLSCRASQSISSNLAWYHQKPGQAPRLLIYGASTRATGIPARFSGSGSGTEFTLTISSLQSEDFAVYYCQQYNSYSLTFGGGTKVEIK

SEQ ID NO: 1590 - protein, 108 aa, Homo sapiens
EIVLTQSPGTLSLSPGERATLSCRASQSVSSSYLAWYQQKPGQAPRLLIYGASSRATGIPDRFSGSGSGTDFTLTISRLEPEDFAVYYCQYYGSSPFGFGPGTKVDIK

SEQ ID NO: 1591 - protein, 109 aa, Homo sapiens
EIVLTQSPATLSLSPGERATLSCRASQSVSRFLAWYQQKPGQAPRLLIYDASNRATGIPARFSGSGSGTDFTLTISSLEPEDFAVYYCQQRSNWPPRLTFGGGTKVEIK

SEQ ID NO: 1592 - protein, 110 aa, Homo sapiens
QSVLTQPPSASGTPGQRVTISCSGSSSNIGSNTVNWYQQLPGTAPKLLIYSNNQRPSGVPDRFSGSKSGTSASLAISGLQSEDENNYYCAVWDDSLNGVVFGGGTKLTVL

SEQ ID NO: 1593 - protein, 110 aa, Homo sapiens
QSVLTQPPSASGTPGQRVTISCSGSSSNIGSNYVYWYQQLPGTAPKLLISRNNQRPSGVPDRFSGSKSGTSASLAISGLQSEDEANYYCLVWDDSLNGLVFGGGTKLTVL

SEQ ID NO: 1594 - protein, 110 aa, Homo sapiens; identical to SEQ ID NO: 1398

SEQ ID NO: 1595 - protein, 113 aa, Homo sapiens
DFVMTQSPGSLAVSLGERATINCRSSQSVLDNSSNKNHLAWHQQKPGQPPKLLIYWASTRESGVPDRFSGSGSGTDFTLTISSLQAEDVAVYYCQQYYSSHWTFGQGTKVEIK

SEQ ID NO: 1596 - protein, 110 aa, Homo sapiens
QSALTQPASVSGSPGQSITISCTGTSSDVGSYNLVSWYQQHPGKAPKLMIYEVSKRPSGVSNRFSGSKSGNTASLTISGLQAEDEADYYCYSYAGSSTWVFGGGTKLTVL

SEQ ID NO: 1597 - protein, 108 aa, Homo sapiens
SYELTQPPSVSVSPGQTARITCSADALPKQYAYWYQQKPGQAPVLVIYKDSERPSGIPERFSGSSSGTTVTLTISGVQAEDEADYYCQSTDSSGSYVVFGGGTKLTVL

SEQ ID NO: 1598 - protein, 107 aa, Homo sapiens
DIQMTQSPSSLSASVGDRVTITCRASQNIASYLNWYQQKPGKAPKLLIYAASSLQSGVPSRFSGSGSGTDFTLTISSLQPEEFATYYCHQSYFTPQTFGQGTKLEIK

SEQ ID NO: 1599 - protein, 108 aa, Homo sapiens
EIVLTQSPATLALSVGERATLSCVASQRVSSDYIAWYQKKPGLAPRLLVYHGSAWATGSSARFSGSGSGTAFTLTISSLEPEDFAVYYCQQYGNSPFTFGPGTKVEFK

SEQ ID NO: 1600 - protein, 108 aa, Homo sapiens
EIVLTQSPGTLSLSPGERATLSCRASQSVSSSYLAWYQEKPGQAPRLLMYSASSRATGIPDRFSGSGSATDFTLTINRLEPEDFAVYYCQQYVEPPFTFGQGTKLEIK

SEQ ID NO: 1601 - protein, 110 aa, Homo sapiens
QSALTQPRSVSGSPGQSVTISCTGTSSDVGGYNYVSWYQQHPGKAPKLMIYDVSKRPSGVPDRFSGSKSGNTASLTVSGLQAEDEAEYYCSAYAGSNNLVFGGGTKLTVL

SEQ ID NO: 1602 - protein, 107 aa, Homo sapiens
EIVLTQSPGTLSLSPGERATLSCRAGQTVSSSYLAWYQHKPGQAPRLLIYGASSRATGIPDRFSGSGSGTDFTLTISRLEPEDFAVYYCQQYGSSYTFGQGTKLEIK

SEQ ID NO: 1603 - protein, 107 aa, Homo sapiens
DIQMTQSPSSLSASVGDRVTITCRASQSISSYLNWYQQKPGKAPKLLIYAASSLQSGVPSRFSGSGSGTDFTLTISSLQPEDYATYYCQQSYSTPGTFGQGTRLEIK

SEQ ID NO: 1604 - protein, 108 aa, Homo sapiens
EIVLTQSPGTLSLSPGERATLSCRASQSVSSSYLAWYQQKPGQAPRLLIYGASSRATGIPDRFSGSGSGTDFTLTISRLEPEDFAVYYCQQYGRSSGTFGQGTKVEIK

SEQ ID NO: 1605 - protein, 109 aa, Homo sapiens
EIVLTQSPGTLSLSPGERATLSCRASQSVSSSYLAWYQQKPGQAPRLLIYGASSRATGIPDRFSGSGSGTDFTLTISRLEPEDFAVYYCQQYGSSPLITFGQGTRLEIK

SEQ ID NO: 1606 - protein, 113 aa, Homo sapiens; identical to SEQ ID NO: 1403

SEQ ID NO: 1607 - protein, 109 aa, Homo sapiens
QTVVTQEPSLTVSPGGTVTLTCASSAGAVTSGYYPNWFQQKPGQAPRALIYSTANKHSWTPARFSGSLLGGKAALTLSGVQPEDEAEYYCLLYYGGAWVFGGGTKLTVL

SEQ ID NO: 1608 - protein, 107 aa, Homo sapiens
EIVLTQSPDFQSVTPKEKVTITCRASQNIGSSLHWYQQKPDQSPKVIIKYASQSFSGVPSRFSGSGSGTDFTLTINSLEAEDAATYYCHQSSSLPPTFGGGTKVEIK

SEQ ID NO: 1609 - protein, 108 aa, Homo sapiens
EIVLTQSPATLSLSPGERATLSCRASQSISSFLAWYQQKPGQAPRLLIYDASNRATGIPARFSGSGSGTDFTLTISSLEPEDFAVYYCQRRSNWPPFTFGPGTKVDIK

SEQ ID NO: 1610 - protein, 111 aa, Homo sapiens; identical to SEQ ID NO: 1272

SEQ ID NO: 1611 - protein, 108 aa, Homo sapiens; identical to SEQ ID NO: 1366

SEQ ID NO: 1612 - protein, 113 aa, Homo sapiens
DIVMTQSPDSLAVSLGERATINCKSSQSVLYSSNNKNYLAWYQQKPGQPPKLLIYWASTRESGVPDRFSGSGSGTDFTLTISSLQAEDVAVYYCQQYYSSPYTFGQGTKLEIK

SEQ ID NO: 1613 - protein, 108 aa, Homo sapiens
EIVLTQSPGTLSLSPGERATLSCRASQSVSSSYLGWYQQKPGQAPRLLIYGASSRATGIPDRFSGSGSGTDFTLTISRLESEDFALYYCQQYNNWWRTFGQGTKVEIK

SEQ ID NO: 1614 - protein, 109 aa, Homo sapiens
EIVLTQSPGTLSLSPGERATLSCRASQSVSSSYLAWYQQKRGQAPRLLIYGASSRATGIPDRFSGSGSGTDFTLTISRLEPEDFAVYYCQQYGSSPRLTFGGGTKVEIK

SEQ ID NO: 1615 - protein, 110 aa, Homo sapiens
QSVLTQPPSASGTPGQRVTISCSGSNSNIGSYTVNWYQQLPGTAPKLLIYDNNQRTSGVPDRLSGSKSGTSASLAISGLQSEDEANYYCAVWDDSLNGLVFGGGTKLTVL

SEQ ID NO: 1616 - protein, 111 aa, Homo sapiens
QSVLTQPPSVSGAPGQRVTISCTGSSSNIGAGYDVHWYQQLPGTAPKLLIFGNTNRPSGVPDRFSGSKSGTSTSLAITGLQAEDEADYYCQSYDSSLNGDVFGGGTKLTVL

SEQ ID NO: 1617 - protein, 109 aa, Homo sapiens
EIVLTQSPATLSLSPGERATLSCRASQSVSSYLAWYQQKPGQAPRLLIYDAYKRDTGIPARFSGSGSGTDFTLTISSLEPEDFAVYYCQQRSNWPLIFTFGPGTKVDIK

SEQ ID NO: 1618 - protein, 111 aa, Homo sapiens
QSVLTQPPSVSGVPGQRVTVSCTGSSSNIGAGFDVYWYQQFLGTAPKLLIYGNNNRPSGVPDRFSASKSGTSASLAITGLQAEDEADYYCQSYDSSLSGYVFGTGTKVTVL

SEQ ID NO: 1619 - protein, 108 aa, Homo sapiens
DIQMTQSPSSLSASVGDRVTITCRASQSISSYLNWYQQKPGKAPKLLIYDASSLQSGVPSRFSGSGSGTDFTLTISSLQPEDFATYYCQQSYSTPPITFGQGTRLEIK

SEQ ID NO: 1620 - protein, 108 aa, Homo sapiens
DIQMTQSPSSLSTSVGDRVTITCRASQSIRSYLNWYQQKPGKAPKLLIYVASSLQSGVPSRFSGSGSGTDFTLTISSLQPEDFATYYCQQSYSTPPWTFGQGTKVEIK

SEQ ID NO: 1621 - protein, 107 aa, Homo sapiens; identical to SEQ ID NO: 1367

SEQ ID NO: 1622 - protein, 110 aa, Homo sapiens
QSVLTQPPSASGTPGQRVTISCSGSNSNIGSYTVNWYQQLPGTAPKLLIFGNNQRPSGVPDRFSGSKSGTSASLAISGLQSEDEADYYCVAWDDSRNGLVFGGGAKLTVL

SEQ ID NO: 1623 - protein, 110 aa, Homo sapiens
SYELTQPPSVSVSPGQTARITCSTDALPNEYIYWYQQKPGQAPVLVIYKDSERPSGIPERFSGSSSGTTVTLTISGVQAEDEADYYCQSVDSSGTYPHVIFGGGTKLTVL

SEQ ID NO: 1624 - protein, 107 aa, Homo sapiens
DIQMTQSPSSLSASVGDRVTITCRASQSIISYLNWYHQKPGKAPKLLIYAASSLQSGVPSRFSGSGSGTDFTLTISSLQPEDFATYYCQQSYSTPYTFGQGTKLEIK

SEQ ID NO: 1625 - protein, 107 aa, Homo sapiens
DIQLTQSPSFLSASVGDRVTITCRASQGISSYLAWYQQKPGKAPKLLIYAASTLQSGVPSRFSGSGSGTEFTLTISSLQPEDFATYYCQQLNSYPLTFGGGTKVEIK

SEQ ID NO: 1626 - protein, 112 aa, Homo sapiens
QSALTQPASVSGSPGQSITISCTGTSSDVGGYNFVSWYQQHPGKAPKLIIYDVSNRPSGVSNRFSGSKSGNTASLTISGLQAEDEADYYCTSYTSSSTLNVVFGGGTKLTVL

SEQ ID NO: 1627 - protein, 110 aa, Homo sapiens
QSALTQPASVSGSPGQSITISCTGTSSDVGSYNLVSWYQQHPGKAPKLMIYEVSKRPSGVSNRFSGSKSGNTASLTISGLQAEDEADYYCCSYASSSIVVFGGGTKLTVL

SEQ ID NO: 1628 - protein, 108 aa, Homo sapiens
DIQMTQSPSSLSASVGDRVTITCRASQSISSYLNWYQQKPGKAPKLLLYAASSLQSGVPSRFSGSGSGTDFTLTISSLQPEDFATYYCQQSYSTPPWTFGQGTKVEIK

SEQ ID NO: 1629 - protein, 108 aa, Homo sapiens
DIQLTQSPSFLSASVGDRVTITCRASQGISSYLAWYQQKPGKAPKLLIYAASTLQSGVPSRFSGSGSGTEFTLTISSLQPEDFATYYCQQLNSYSFETFGPGTKVAIK

SEQ ID NO: 1630 - protein, 112 aa, Homo sapiens; identical to SEQ ID NO: 1381

SEQ ID NO: 1631 - protein, 107 aa, Homo sapiens
DIQMTQSPSTLSASIGDRVTITCRASQSISSWLAWYQQIPGKAPKLLIYKASSLESGVPSRFSGSGSGTEFTLTISSLQPDDFATYYCQQYNSYPYTFGQGTKLEIK

SEQ ID NO: 1632 - protein, 107 aa, Homo sapiens
DIQMTQSPSSLSASIGDRVTITCRASQNIRSYLNWYQHKPGKAPKLLIYAASTLQSGVPSRFSGSESGTDFTLTISSLQPEDFATYYCQQSSSSPITFGQGTKLEIK

SEQ ID NO: 1633 - protein, 107 aa, Homo sapiens; identical to SEQ ID NO: 1362

SEQ ID NO: 1634 - protein, 108 aa, Homo sapiens
SYELAQPPSVSVAPGETATIFCRATYIGRKNVQWYQQKPGQAPVLVVYDDSDRPSGIPGRFSGSNSGDTATLTISRIEAGDEAAYYCQVWDGINDRVVFGGGTKLTVL

SEQ ID NO: 1635 - protein, 107 aa, Homo sapiens; identical to SEQ ID NO: 1380

SEQ ID NO: 1636 - protein, 107 aa, Homo sapiens
DFQMTQSPSSLSASVGDRVTITCRASQSISTYLNWYQQKPGKAPNLLIFAASSLHSGVPSRFSGSGSGTDFTLSISSLQPEDFATYYCQQSYSSEWTFGQGTKVEIK

SEQ ID NO: 1637 - protein, 111 aa, Homo sapiens
QSLLTQPPSVSGAPGQRVTLSCAGATSNIGAGSDVHWYQQLPGTAPKLLIYYNTNRPSGVPDRFSGSKSATSASLVITGLQTEDEADYYCQSYDISLGGWVFGGGTKLTVL

SEQ ID NO: 1638 - protein, 108 aa, Homo sapiens
DIQMTQSPSSLSASVGDRVTITCRASQSVSIYLNWYQQKPGKAPKLLIYAASSLQSGVPSRFSGSGSGTDFTLTVSSLQPEDFATYYCQQSYSMPPITFGQGTRLEIK

SEQ ID NO: 1639 - protein, 111 aa, Homo sapiens
QSVLTQPPSASGTPGQRVTISCSGSSSNIGSNSLNWYQQLPGTAPKLLIYSNNQRPSGVPDRFSGSKSGTSASLAISGLQSEDEADYYCAAWDDSLNGSWVFGGGTKLTVL

SEQ ID NO: 1640 - protein, 110 aa, Homo sapiens
QSVLTQPPSASGTPGQRVTISCSGSRYNIGSNYVYWYQQLPGTAPRLLIYSNNQRPSGVPDRFSGSKSGTSASLAISGLRSEDEADYYCAAWDDSLSGLIFGGGTKLTVQ

SEQ ID NO: 1641 - protein, 110 aa, Homo sapiens
QSALTQPASVSGSPGQSITISCTGTSSDVGSYNLVSWYQQHPGKAPKLMIYEGSKRPSGVSNRFSGSKSGNTASLTISGLQAEDEADYYCCSYAGSSTWLFGGGTKLTVL

SEQ ID NO: 1642 - protein, 109 aa, Homo sapiens; identical to SEQ ID NO: 1359

SEQ ID NO: 1643 - protein, 111 aa, Homo sapiens
QSVLTQPPSVSGAPGQRVTISCTGSSSNIGAGYDVHWYQQLPETAPKLLIYANSNRPSGVPDRFSGSKSGTSASLAISGLQSEAEADYYCVAWDDSRNGLVFGGGAKLTVL

SEQ ID NO: 1644 - protein, 110 aa, Homo sapiens
QSVLTQPPSVSAAPGQKVTISCSGSSSNIGNNYVSWYQQLPGTAPKLLIYDNNERPSGIPDRFSGSKSGTSATLGITGLQTGDEADYYCGTWDSSLSAYVFGTGTKVTVL

SEQ ID NO: 1645 - protein, 109 aa, Homo sapiens; identical to SEQ ID NO: 1386

SEQ ID NO: 1646 - protein, 106 aa, Homo sapiens
SYELTQPPSVSVSPGQTASITCSGDKLGDKYACWYQQKPGQSPVLVIYQDTKRPSGIPERFSGSNSGNTATLTISGTQAMDEADYYCQAWGSSRGVFGGGTKLTVL

SEQ ID NO: 1647 - protein, 109 aa, Homo sapiens
SSELTQDPAVSVALGQTVRITCQGDSLRSYYASWYQQKPGQAPVVVIYGKNNRPSGIPDRFSGSSSGNKASLTITGAQAGDEADYYCNSRDNSGNLNWVFGGGTKLTVL

SEQ ID NO: 1648 - protein, 107 aa, Homo sapiens
DIQMTQSPSSLSASVGDRVTITCQASQDINNYLNWYQQKSGKAPKLLIYDASNLETGVPSRFSGSGSGTDFTFTINSLQPEDIATYYCQQYDNLPYTFGQGTKLEIK

SEQ ID NO: 1649 - protein, 106 aa, Homo sapiens
SYELTQPPSVSVSPGQTARITCSGDALPKQYAYWYQQKPGQAPVLVIYKDTERPSGIPERFSGSSSGTTVTLTISGVQAEDEADYYCQSADSSGSRFGGGTKLTVL

SEQ ID NO: 1650 - protein, 107 aa, Homo sapiens
EIVMTQSPATLSVSPGERATLSCRASQSVSSNLAWYQQKPGQAPRLLIYGASTRATVIPARFSGSGSGTEFTLTISSLQSEDFAVYYCQQYNNWPYTFGQGTKLEIK

SEQ ID NO: 1651 - protein, 108 aa, Homo sapiens; identical to SEQ ID NO: 1375

SEQ ID NO: 1652 - protein, 110 aa, Homo sapiens
QSVLTQPPSASGTPGQRVTISCSGSSSNIGSNTVNWYQQLPGTAPKLLIYNNNQRPSGVPDRLSGSKSGTSASLAISGLQSEDEADYYCATWDDSLNGPVFGGGTKLTVL

SEQ ID NO: 1653 - protein, 112 aa, Homo sapiens; identical to SEQ ID NO: 1361

SEQ ID NO: 1654 - protein, 108 aa, Homo sapiens
SYELTQPPSVSVSPGQTARITCSGDALPKQYAYWYHQKPGQAPVLVIYKDSERPSGIPERFSGSSSGTTVTLTISGVQAEDEADYYCQSADSSGTSVLFGGGTKLTVL

SEQ ID NO: 1655 - protein, 110 aa, Homo sapiens
QSALTQPASVSGSPGQSITISCTGTSSDVGSYNLVSWYQQHPGKAPKLMIYEGSKRPSGVSNRFSGSKSGNTASLTISGLQAEDEADYYCCSYARSSTRVFGGGTKLTVL

SEQ ID NO: 1656 - protein, 106 aa, Homo sapiens
SYELTQPPSVSVSPGQTARITCSGDAFPKQYGYWYQQKPGQAPVLVIYKDSERPSGIPERFSGSSSGTTVTLTISGVQAEDEADYYCQSADSRGAVFGSGTKVTVL

SEQ ID NO: 1657 - protein, 110 aa, Homo sapiens
QSVLTQPPSASGTPGQSVTISCSGSSSNIGNNKVNWYQQLPGTAPKVLIYNSNQRPSGVPDRFSGSKSGTSASLAISGLQSEDEADYYCAVWDDSLHSYVFGTETKVTVL

SEQ ID NO: 1658 - protein, 107 aa, Homo sapiens
DIQMTQSPSSLSASVGDRVTITCRASQSISRYLNWYQQKPGKAPKLLIYTASSLQSGVPSRFSGSGSGTDFTLTISSLQPEDFATYYCQQSYSTPRTFGQGTKVEIK

SEQ ID NO: 1659 - protein, 107 aa, Homo sapiens
DIQMTQSPSSLSASVGDRVTITCRASQSISNYLNWYQQKPGKAPKLLIYDASNLETGVPSRFSGSGSGTDFTFTISSLQPDDIATYYCQQYDNLPLAFGPGTKVDIK

SEQ ID NO: 1660 - protein, 107 aa, Homo sapiens; identical to SEQ ID NO: 1362

SEQ ID NO: 1661 - protein, 111 aa, Homo sapiens
QSVLTQPPSVSGAPGQRVTISCTGSSSNIGARYDVHWYQQLPGTAPKLLMYGNNNRPSGVPDRFSGSKSGTSVSLAITGLQAEDEADYYCQSYDSSLSGWVFGGGTKLTVL

SEQ ID NO: 1662 - protein, 107 aa, Homo sapiens
VIQMTQSPSSLSASVGDRVTITCQASQDINKYLNWYQQKPGKAPKLLIYDASNLETGVPSRFSGSGSGTDFTFTISSLQPEDIATYYCQQYANLPFTFGPGTKVDIK

SEQ ID NO: 1663 - protein, 107 aa, Homo sapiens
VIQMTQSPSSLSASVGDRVTITCQASQDINKYLNWYQQKPGKAPKLLIYDASNLETGVPSRFSGSGSGTDFTFTISSLQPEDIATYYCQQYDNLPRTFGQGTKLEIK

SEQ ID NO: 1664 - protein, 111 aa, Homo sapiens
QSVLTQPPSVSGAPGQRVTISCTGSSSNIGAGYDVHWYQQLPGTAPKLLIYGNSNRPSGVPDRFSGSKSGTSASLAISGLQAEDEADYSCQSYDSSLSGYVFGTGTKVTVL

SEQ ID NO: 1665 - protein, 111 aa, Homo sapiens; identical to SEQ ID NO: 1415

SEQ ID NO: 1666 - protein, 108 aa, Homo sapiens
DIQMTQSPSSLSASVGDRVTITCRASQSISSYLNWYQQKPGKAPKLLIYAASSLQSGVPSRFSGSGSGTDFTLTISSLQPEDFATYYCQQSYSNPSYTFGQGTKLEIK

SEQ ID NO: 1667 - protein, 110 aa, Homo sapiens
EIVLTQSPGTLSLSPGERATLSCRASQSVASSYLAWYQQKPGQAPRLLIYGASGRATGIPDRFSGSGSGTDFTLTISRLEPEDFAVYYCQQYGSSPPRYTFGQGTKLEIK

SEQ ID NO: 1668 - protein, 108 aa, Homo sapiens
DIQMTQSPSSLSASVGDRVTITCRASQSISSYLNWYQQRPGKAPKLLIYAASSLQSGVPSRFSGSGSGTDFTLTISTLQPEDFATYYCQQSYSTLLYTFGQGTKLEIK

SEQ ID NO: 1669 - protein, 112 aa, Homo sapiens; identical to SEQ ID NO: 1418

SEQ ID NO: 1670 - protein, 109 aa, Homo sapiens
SYVLTQPPSVSVAPGKTASITCEGNNIGSKSVHWYQQKPGQAPVLVIYYDSDRPSGIPERFSGSNSGNTATLTISRVEAGDEADYYCQVWDSSSDRLYVFGTGTKVTVL

SEQ ID NO: 1671 - protein, 108 aa, Homo sapiens
DIQLTQSPSFLSASVGDRVTITCRASQGISSYLAWYQQKPGKAPKLLIYAASTLQSGVPSRFSGSGSGTDFTLTISSLQPEDFATYYCQQSYSNPSYTFGQGTKLEIK

SEQ ID NO: 1672 - protein, 110 aa, Homo sapiens
QSALTQPASVSGSPGQSITISCTGTSSDVGSYNLVSWYQQHPGKAPKLMIYEGSKRPSGVSNRFSGSKSGITASLTISGLQAEDEADYYCCSYAGSSTWLFGGGTKLTVL

SEQ ID NO: 1673 - protein, 111 aa, Homo sapiens
NFMLTQPHSVSESPGKTVTISCTGSSGSIASNYVQWYQQRPGSAPTTVIYEDNQRPSGVPDRFSGSIDSSSNSASLTISGLKTEDEADYYCQSYDSTSRVVFGGGTKLTVL

SEQ ID NO: 1674 - protein, 108 aa, Homo sapiens
SYVLTQPPSVSVAPGRTARITCGGNNIGSKSVHWYQQKPGQAPVLVVYDDSDRPSGIPERFSGSKFGNTATLIISRVEAGDEADYSCQVWDSGSDHVVFGGGTKVTVL

SEQ ID NO: 1675 - protein, 107 aa, Homo sapiens
DIQMTQSPSSLSASVGDRVTITCRASQSISSYLNWYQQKPGKAPKVLIYAASTMQSGVPSRFRGSGSGTDFTLTISSLQLEDFATYYCQQSYSTPQTFGQGTKVEIK

SEQ ID NO: 1676 - protein, 110 aa, Homo sapiens
QSVLTQPPSVSEAPRQRVTISCSGGSSNIGNNAVNWYQQLPGKAPKLLIYYDDLLPSGVSDRFSGSKSGTSASLAISGLQSEDEADYYCASWDDSLIGPVFGGGTKLTVL

SEQ ID NO: 1677 - protein, 108 aa, Homo sapiens
DIQLTQSPSFLSASVGDRVTITCRASQGISTYLAWYQQKPGKAPKLLIYAASTLQSGVPSRFSGSGSGTEFTLTISSLQPEDFATYYCQQLNSYPGYTFGQGTKLEIK

SEQ ID NO: 1678 - protein, 110 aa, Homo sapiens
NLMLTQPHSVSESPGKTVTISCTGSSGSIASNYVQWYQQRPGSAPTTVIYEDNQRPSGVPDRFSGSIDSSSNSASLTISGLKTEDEADYYCQSYDSNNQVFGGGTKLTVL

SEQ ID NO: 1679 - protein, 110 aa, Homo sapiens
NFMLTQPHSVSESPGKTVTISCTRSSGSIASSYVQWYQQRPGSAPTTVIYEDNQRPSGVPDRFSGSIDSSSNSASLTISGLKTEDEADYYCQSYDSSDVVFGGGTKLTVL

SEQ ID NO: 1680 - protein, 109 aa, Homo sapiens
SYVLTQPPSVSVAPGKTARITCGGNNIGSKNVHWYQQKPGQAPVKVVYHDGDRPSGIPERFSGSNSGNTATLTINRVEAGDEADYSCQVWDSSSDHHVVFGGGTKLTVL

SEQ ID NO: 1681 - protein, 108 aa, Homo sapiens
SYELTQPPSVSVSPGQTARITCFGDALPKQYAYWYQQKPGQGPVLVIYKDSERPSGIPERFSGSTSGTTVTLTISGVQAEDEADYYCQSADSSGTYRVFGGGTKLTVL

SEQ ID NO: 1682 - protein, 107 aa, Homo sapiens
EIVMTQSPATLSVSPGERVTLSCRASQSVSSNLAWCQQKPGQAPRLLIYGASTRATGIPARFSGSGSGTEFTLTISSLQSEDFAVYYCQQYYNWPLTFGGGTKVEIK

SEQ ID NO: 1683 - protein, 108 aa, Homo sapiens
SYELTQPPSVSVSPGQTARITCSGDALPKQYAYWYQQKPGQAPVLVIYKDSERPSGIPERFSGSSSGTTVTLTISGVQAEDEADYYCQSADSSAAYVVFGGGTKLTVL

SEQ ID NO: 1684 - protein, 107 aa, Homo sapiens
SYELTQPPSVSVSPGQTARITCSGDALPKKYTYWYQQKSGQAPVVVIYEDSKRPSGIPERFSGSSSGTMATLTISGAQVEDEADYYCYSTDSSGKGVFGGGTKLTVL

SEQ ID NO: 1685 - protein, 109 aa, Homo sapiens
SYVLTQPPSVSVAPGKTARITCGGNNIGSKSVHWYQQKPGQAPVLVVYDDSDRPSGIPERFSGSNSGNTATLTISRVEAGDEADYYCQVWDSSSDPFYVFGTGTKVTVL

SEQ ID NO: 1686 - protein, 112 aa, Homo sapiens; identical to SEQ ID NO: 1372

SEQ ID NO: 1687 - protein, 113 aa, Homo sapiens; identical to SEQ ID NO: 1416

SEQ ID NO: 1688 - protein, 107 aa, Homo sapiens
DIQMTQSPSTLSASVGDRVTITCRASQSISSWLAWYQQKPGKAPKLLIYKASSLESGVPSRFSGSGSGTEFTLTISSLQPDDFATYYCQQYNSYSYTFGQGTKLEIK

SEQ ID NO: 1689 - protein, 109 aa, Homo sapiens
EIVMTQSPATLSVSPGERATLSCRASQSVSNNLAWYQQKPGQAPRLLIYGASTRATGIPVRFSGSGSGTEFTLTISSLQSEDFAVYYCQQYDDWPPEVTFGGGTKVEIK

SEQ ID NO: 1690 - protein, 111 aa, Homo sapiens
QSVLTQPPSVSGAPGQRVTISCTGSSSNIGSGSDVHWYQQLPGTAPKLLIYGNTNRPSGVPDRFSGSKSGTSASLAITGLQAEDEADYYCVAWDDSRNGLVFGGGAKLTVL

SEQ ID NO: 1691 - protein, 111 aa, Homo sapiens
QSVLTQPPSVSGVPGQRVTVSCTGSSSNIGAGFDVYWYQQFLGTAPKLLIYGNNNRPSGVPDRFSASKSGTSASLAITGLQAEDEADYYCQSFDIGRGGWIFGGGTKLTVL

SEQ ID NO: 1692 - protein, 107 aa, Homo sapiens
DIQMTQSPSSLSASVGDRVTITCRPSQSITTYLNWYQQKPGKAPRLLIYAVSSLQSGVPSRFSGSGSGTDFTLTISSLQPEDFATYYCQQSYSTPPTFGQGTRLEIK

SEQ ID NO: 1693 - protein, 111 aa, Homo sapiens; identical to SEQ ID NO: 1377

SEQ ID NO: 1694 - protein, 108 aa, Homo sapiens
QSALTQPASVSGSPGQSITISCTGTSSDVGSYNLVSWYQQHPGKAPKLKIYEGSKRPSGVSNRFSGSKSGNTASLTISGLQAEDEADYYCCSYAGSVLFGGGTKLTVL

SEQ ID NO: 1695 - protein, 107 aa, Homo sapiens
DIQMTQSPSSLSASAGDRVTITCRASQSIRYYLNWYQQKPGKAPKLLIYAASSLQSGVPSRFSGSGSGTDFTLTISSLQPEDFAAYYCQQSFSTPRTFGQGTKLEIK

SEQ ID NO: 1696 - protein, 110 aa, Homo sapiens; identical to SEQ ID NO: 1399

SEQ ID NO: 1697 - protein, 112 aa, Homo sapiens
DIVMTQSPLSLPVTPGEPASISCRSSQSLLHSNGYNFLDWYLQKPGQSPQLLIYLGSNRASGVPDRFSGSGSGTDFTLKISRVQAEDVGVYYCMQALQTPWTFGQGTKVEIK

SEQ ID NO: 1698 - protein, 108 aa, Homo sapiens
SSELTQDPAVSVALGQTVRITCQGDSLRRYYASWYQQKPGQAPVLVIYGKNNRPSGIPDRFSGSSSGNTASLTITGAQAEDEADYYCNSRDSSGNPRWFGGGTKLTVL

SEQ ID NO: 1699 - protein, 110 aa, Homo sapiens
EIVLTQSPGTLSLSPGERATLSCRASQSVSSSYLAWYQQKPGQAPRLLIYGASSRATGIPDRFSGSGSGTDFTLTISRLEPEDFAVYYCQQYGSSPPRYTFGQGTKLEIK

SEQ ID NO: 1700 - protein, 108 aa, Homo sapiens
SYELTQPPSVSVSPGQTARITCSTDALPNEYIYWYQQKPGQAPVLVIYKDSERPSGIPERFSGSSSGTTVTLTISGVQAEDEADYYCQSVDSSGTYRVFGGGTKLTVL

SEQ ID NO: 1701 - protein, 107 aa, Homo sapiens
DIQMTQSPSSLSASVGDRVTITCQASQDISNYLNWYQQKAGKAPKLLIYDASNLETGVPSRFSGSGSGTDFTFTISSLQPDDIATYYCQQYDNLPLAFGPGTKVDVK

SEQ ID NO: 1702 - protein, 112 aa, Homo sapiens
DVVMTQSPLSLPVTLGQPASISCRSSQSLVYSDGNTYLNWFQQRPGQSPRRLIYKVSSRDSGVPDRFSGSGSGTAFTLKISRVEAEDVGVYYCMQGTHWPYTFGQGTKLEIK

SEQ ID NO: 1703 - protein, 110 aa, Homo sapiens
QSALTQPRSVSGSPGQSVTISCTGTSSDVGGYTYVSWYQQHPGKAPKLMIYDVNKRPSGVPDRFSGSKSGITASLTISGLQAEDEADYYCCSYAGRYTWVFGGGTTLTVL

SEQ ID NO: 1704 - protein, 107 aa, Homo sapiens; identical to SEQ ID NO: 1365

SEQ ID NO: 1705 - protein, 106 aa, Homo sapiens
SYELTQPPSVSVSPGQTARITCSGDALPKQYAYWYQQKPGQAPVLVIYRDSERPSGIPERFSGSTSGTTVTLTISGVQAEDEADYYCQSADSTGWVFGGGTKLTVL

SEQ ID NO: 1706 - protein, 112 aa, Homo sapiens
DIVMTQTPLSLSVTPGQPASFSCKSSQSLLHSDGKTYLYWYLQKPGQSPQLLIYAVSNRFSGVPDRFSGSGSGTDFTLKISRVEAEDVGVYYCMQSIQLPYTFGQGTKLEIK

SEQ ID NO: 1707 - protein, 110 aa, Homo sapiens; identical to SEQ ID NO: 1468

SEQ ID NO: 1708 - protein, 109 aa, Homo sapiens
ETVLTQSPGTLSLSPGERATLSCRASQSVSSSYLAWYQQKPGQAPRLLIYGASSRATGIPDRFSGSGSGTDFTLTISRLEPEDFAVYYCQHYGSSRGWTFGQGTKVEIK

SEQ ID NO: 1709 - protein, 107 aa, Homo sapiens; identical to SEQ ID NO: 1682

SEQ ID NO: 1710 - protein, 107 aa, Homo sapiens; identical to SEQ ID NO: 1631

SEQ ID NO: 1711 - protein, 108 aa, Homo sapiens; identical to SEQ ID NO: 1375

SEQ ID NO: 1712 - protein, 107 aa, Homo sapiens; identical to SEQ ID NO: 1367

SEQ ID NO: 1713 - protein, 109 aa, Homo sapiens; identical to SEQ ID NO: 1404

SEQ ID NO: 1714 - protein, 110 aa, Homo sapiens; identical to SEQ ID NO: 1623

SEQ ID NO: 1715 - protein, 112 aa, Homo sapiens
QSVLTQPPSVSGAPGQRVTISCTGSSSNIGAGYDVHWYQQLPGTAPKLLIYGNTNRPSGVPDRFSGSKSGTSASLAITGLQAEDEADYYCQSYASSLSAHVVFGGGTKLTVL

SEQ ID NO: 1716 - protein, 112 aa, Homo sapiens
DIVMTQSPDSLAVSLGERATINCKSSQSVLYSSNNENYLAWYQQKPGQPPKLLIYWASTRESGVPDRFSGSGSGTDFTLTISSLQAEDVAVYYCQQYYSSYTFGQGTKVEIK

SEQ ID NO: 1717 - protein, 110 aa, Homo sapiens
EIVMTQSPGTLSLSPGERATLSCRASQSVSSSYLAWYQQKPGQAPRLLIYGASSRATGIPDRFSGSGSGTDFTLTISRLEPEDFAVYYCQQYGSSPPPFTFGPGTKVDIK

SEQ ID NO: 1718 - protein, 111 aa, Homo sapiens
NFMLTQPASVSGSPGQSITISCTGASSDVGGYNYVSWYQQHPGKAPKLMIYDVSNRPSGVSNRFSGSKSGNTASLTISGLQAEDEADYYCSSYTSSSTPVVFGGGTELTVL

SEQ ID NO: 1719 - protein, 107 aa, Homo sapiens
DIVMTQSPSSLSASVGDRVTITCRASQGISNYLAWYQQKPGKVPKLLIYAASTLQSGVPSRFSGSGSGTDFTLTISSLQPEDVATYYCQKYNSAPPAFGQGTKVDIK

SEQ ID NO: 1720 - protein, 107 aa, Homo sapiens
QSALTQPPSVSVSPGQTASIPCSGDKLGDIYACWYQQKPGQSPVLVIYQDTKRPSGIPERFSGSNSGNTATLTISGTQAMDEADYYCQAWGSTTAKVFGGGTKLTVP

SEQ ID NO: 1721 - protein, 109 aa, Homo sapiens
DIQLTQSPATLSLSPGERATLSCRASQSVSSYLAWYQQKPGQAPRLLIYDASNRATGIPARFSGSGSGTDFTLTISSLEPEDFAVYYCQQRSNWPPRVTFGGGTKVEIK

SEQ ID NO: 1722 - protein, 112 aa, Homo sapiens
QSVLTQPASVSGSPGQSITISCTGTSSDVGGYNYVSWYQQHPGKAPKLMIYDVSNRPSGVSNRFSGSKSGNTASLTISGLQAEDEADYYCSSYTSSSTRHWVFGGGTKLTVL

SEQ ID NO: 1723 - protein, 107 aa, Homo sapiens
DIQMTQSPSSLSASVRDRVTITCRASQSITSSLNWYQQKPGKAPKLLIYAASSLQSGVPSRFSGSGSGTDFTLTISSLQPEDFATYYCQQSYSTPYTFGQGTKVEIK

SEQ ID NO: 1724 - protein, 111 aa, Homo sapiens
NFMLTQPASVSGSPGQSITISCTGSSSDIAPYTFVSWYQQHSGTAPKLIIYDVRNRPSGISDRFSGSRSGNTASLSISGLQAEDEADYYCSAYTTTSTSWVFGGGTKLTVL

SEQ ID NO: 1725 - protein, 110 aa, Homo sapiens
QSALTQPPSASGSPGQSVTISCTGTSSDIGTYNYVSWYQQHPGKAPKLMIYEVTKRPSGVPDRFSGSKSGNTASLTVSGLQADDEGDYYCSSYVGNNNWVFGGGTKLTVL

SEQ ID NO: 1726 - protein, 107 aa, Homo sapiens
DIQLTQSPSSLSASVGDRVTITCQASQDISNYLNWYQQRPGKAPKLLIYDASNLETGVPSRFSGSGSGTDFTFTISSLQPEDIATYYCQQYDNPPLTFGGGTKLEIK

SEQ ID NO: 1727 - protein, 109 aa, Homo sapiens
QSALTQEPSLTVSPGGTVTLTCGSSTGAVTSGHYPYWFQQKPGQAPRTLIYDTSNKRSWTPARFSGSLLGGKAALTLSGAQPEDEAEYYCLLSYSGVWVFGGGTKLTVL

SEQ ID NO: 1728 - protein, 108 aa, Homo sapiens
EIVMTQSPATLSVSPGERATLSCRASQSVSSNLAWYQQKPGQAPRLLIYGASTRATGIPARFSGSGSGTEFTLTISSLQSEDFAVYYCQQYNNWPPWTFGQGTKVEIK

SEQ ID NO: 1729 - protein, 108 aa, Homo sapiens
NFMLTQPPSVSVAPGKTARITCGGNNIGSKSVHWYQQKPGQAPVLVIYYDSDRPSGIPERFSGSNSGNTATLTISRVEAGDEADYYCQVWDSSSDHWVFGGGTKLTVL

SEQ ID NO: 1730 - protein, 108 aa, Homo sapiens
EIVMTQSPATLSVSPGERATLSYRASQSVSSNLAWYQQKPGQAPRLLIYGASTRATGIPARFSGSGSGTEFTLTISSLQSEDFAVYYCQQYNNWPPGTFGQGTKLEIK

SEQ ID NO: 1731 - protein, 106 aa, Homo sapiens
SYELTQPPSVSVSPGQTASITCSGDKLGDKYACWYQQKPGQSPVLVTYQDNKRPSGIPERFSGSNSGNTATLTISGTQAMDEADYYCQAWDSSTAVFGGGTKLTVL

SEQ ID NO: 1732 - protein, 109 aa, Homo sapiens
SYELTQPPSVSVSPGQTARITCSGDALPKQYAYWYQQKPGQAPVLVIYKDSERPSGIPERFSGSSSGTTVTLTISGVQAEDEADYYCQSADSSGTYSVVFGGGTKLTVL

SEQ ID NO: 1733 - protein, 107 aa, Homo sapiens
DIQLTQSPSTLSASVGDRVTITCRASQSISSWLAWYQQKPGKAPKLLIYKASSLESGVPSRFSGSGSGTEFTLTISSLQPDDFATYYCQQYNSYSITFGPGTKVDIK

SEQ ID NO: 1734 - protein, 107 aa, Homo sapiens
DIVMTQSPSFLSASVGDRVTITCRASQGISSYLAWYQQKPGKAPKLLIYAASTLQSGVPSRFSGSGSGTEFTLTISSLQPEDFATYYCQQLHSYPLTFGGGTKVDIK

SEQ ID NO: 1735 - protein, 109 aa, Homo sapiens
DVVMTQSPGTLSLSPGERATLSCRASQNVSSSYLAWYQQKPGQAPRLLIYGASSRATGIPDRFSGSGSGTDFTLTISRLEPEDFAVYYCQQYGSSPLFTFGPGTKVEIK

SEQ ID NO: 1736 - protein, 108 aa, Homo sapiens
DIVMTQSPSSLSASVGDRVTITCRASQSISSYLNWYQQKPGKAPKLLIYAASSLQSGVPSRFSGSGSGTDFTLTISSLQPEDFATYYCQQSYSTPPVTFGGGTKVEIK

SEQ ID NO: 1737 - protein, 108 aa, Homo sapiens
DIVMTQSPSSLSASVGDRVTITCRASQSISNYLNWYQQKPGKAPKLLLYAASDLQSGVPSRFSGSGSGTDFTLTISSLQPEDFATYYCQQSYSTHMSTFGQGTKVDIK

SEQ ID NO: 1738 - protein, 108 aa, Homo sapiens
EIVMTQSPATLSLSPGERATLSCRASQSVSSYLAWYQQKPGQAPRLLIYDASNRATGIPARFSGSGSGTDFTLTISSLEPEDFAVYYCQQRSNWPQVTFGQGTRLEIK

SEQ ID NO: 1739 - protein, 107 aa, Homo sapiens
EIVMTQSPGTLSLSPGERATLSCRASQSVSSSYLAWYQQKPGQAPRLLIYGASSRATGIPDRFSGSGSGTDFTLTISRLEPEDFAVYYCQQYGSLYTFGQGTKVDIK

SEQ ID NO: 1740 - protein, 107 aa, Homo sapiens
DIQMTQSPSSLSASVGDRVTITCQASQDISNYLNWYQQKPGKAPKLLIYDASNLETGVPSRFSGSGSGTDFTFTISSLQPEDIATYYCQQYDNLPLTFGGGTKLEIK

SEQ ID NO: 1741 - protein, 108 aa, Homo sapiens
EIVLTQSPGTLSLSPGERATLSCRASQSVSSSYLAWYQQKPGQAPRLLIYGASSRATGIPDRFSGSWSGTDFTLTISRLEPEDFAVYYCQQYGSSPGTFGQGTKVDIK

SEQ ID NO: 1742 - protein, 108 aa, Homo sapiens
DIVMTQSPGTLSLSPGERATLSCRASQSVSSSYLAWYQQKPGQAPRLLIYGASSRATGIPDRFSGSGSGTDFTLTISRLEPEDFAVYYCQQYGSSLLTFGGGTKVEIK

SEQ ID NO: 1743 - protein, 109 aa, Homo sapiens
DIQLTQSPGTLSLSPGERATLSCRASQSVSSSYLAWYQQKPGQAPRLLIYGASSRATGIPDRFSGSGSGTDFTLTISRLEPEDFAVYYCQQYGSSPRLTFGGGTKVDIK

SEQ ID NO: 1744 - protein, 108 aa, Homo sapiens
EIVLTQSPATLSVSPGERATLSCRASQSVSSSLAWYQQKPGQAPRLLIYAASTRATGIPARFSGSGSGTEFTLTISSLQSEDFAVYYCQQYNNWPPWTFGQGTKLEIK

SEQ ID NO: 1745 - protein, 108 aa, Homo sapiens
EIVMTQSPGTLSLSPGERATLSCRASQSVSSSYLAWYQQKPGQAPRLLIYGASSRATGIPDRFSGSGSGTDFTLTISRLEPEDFAVYYCQQYGSSPGTFGQGTKVEIK

SEQ ID NO: 1746 - protein, 109 aa, Homo sapiens
EIVLTQSPATLSLSPGERATLSCRASQSVSSYLAWYQQEPGQAPRLLIYDASNRATGIPARFSGSGSGTDFTLTISSLEPEDFAVYYCQQRSNWPPMYTFGQGTKVEIK

SEQ ID NO: 1747 - protein, 112 aa, Homo sapiens
DIVMTQSPLSLPVTLGQPASISCRSSQSLVYSDGNTFLNWFQQRPGQSPRRLIYQVSNRDSGVPDRFSGSGSGTDFTLKISRVEAEDVGVYYCMQGTHWPRTFGQGTKLEIK

SEQ ID NO: 1748 - protein, 107 aa, Homo sapiens
DIQLTQSPSSLSASVGDRVTITCRASQGIRNDLGWYQQKPGKAPKRLIYAASSLQSGVPSRFSGSGSGTEFTLTISSLQPEDFATYYCLQHNSYPPLFGQGTKVEIK

SEQ ID NO: 1749 - protein, 108 aa, Homo sapiens
EIVMTQSPATLSLSPGERATLSCRASQSVSSYLAWYQQKPGQAPRLLIYDASNRATGIPARFSGSGSGTDFTLTISSLEPEDFAVYYCQQRSNWPPYTFGQGTKVEIK

SEQ ID NO: 1750 - protein, 109 aa, Homo sapiens
EIVLTQSPATLSLSPGERATLSCRASQSVSSYLAWYQQKPGQAPRLLIYDASNRATGIPARFSGSGSGTDFTLTISSLEPEDFAVYYCQQRSNWPPSITFGQGTRLEIK

SEQ ID NO: 1751 - protein, 107 aa, Homo sapiens
DVVMTQSPSSLSVSVGDRVTITCRASQGIRNDLGWYQQKPGKAPKRLIYAASSLQSGVPSRFSGSGSGTEFTLTISSLQPEDFATYYCLQHNSYLWTFGQGTKLEIK

SEQ ID NO: 1752 - protein, 107 aa, Homo sapiens; identical to SEQ ID NO: 1210

SEQ ID NO: 1753 - protein, 109 aa, Homo sapiens
EIVLTQSPGTLSLSPGERATLSCRASQSVSSSYLAWYQQKPGQAPRLLIYGASSRATGIPDRFSGSGSGTDFTLTISRLEPEDFAVYYCQQYGSSPGVTFGGGTKLEIK

SEQ ID NO: 1754 - protein, 107 aa, Homo sapiens
AIRMTQSPSSLSASVGDRVTITCRASQSISSYLNWYQQKPGKAPKLLIYAASSLQSGVPSRFSGSGSGTDFTLTISSLQPEDFATYYCQQSYSTPQTFGQGTKLEIK

SEQ ID NO: 1755 - protein, 110 aa, Homo sapiens
QPVLTQPASVSGSPGQSITISCTGTSSDVGGYNYVSWYQQHPGKAPKLMIYDVSNRPSGVSNRFSGSRSGDTASLTISGLQAEDEADYYCSSYTSSSTWVFGGGTKLTVL

SEQ ID NO: 1756 - protein, 107 aa, Homo sapiens
QLVLTQPPSVSVSPGQTASITCSGDKLGDKYACWYQQKPGQSPVLVIYQDSKRPSGIPERFSGSNSGNTATLTISGTQAMDEADYYCQAWDSSTAVVFGGGTKLTVL

SEQ ID NO: 1757 - protein, 108 aa, Homo sapiens
EIVMTQSPATLSVSPGERATLSCRASQSVSSNLAWYQHKPGQAPRLLIYGASTRATGIPARFSGSGSGTEFTLTISSLQSEDFAVYYCQQYNYWPLITFGQGTRLEIK

SEQ ID NO: 1758 - protein, 107 aa, Homo sapiens
DIVMTQSPSSLSASVGDRVTITCRASQSISSYLNWYQQKPGKAPKLLIYAASSLQSGVPSRFSGSGSGTDFTLTISSLQPEDFATYYCQQSYSTPRTFGQGTKVEIK

SEQ ID NO: 1759 - protein, 106 aa, Homo sapiens
QSVLTQPPSVSVAPGQTARITCGGNNIGSKSVHWYQQKPGQAPVLVVYDDSDRPSGIPERFSGSNSGNTATLTISRVEAGDEADYYCQVWASSSVVFGGGTKLTVL

SEQ ID NO: 1760 - protein, 112 aa, Homo sapiens
DIVMTQTPLSLSVTPGQPASISCKSGQSLLHSDGKTYLYWYLQKPGQPPQLLIYEVSNRFSGVPDRFSGSGSGTDFTLKISRVEAEDVGVYYCMQSIQLPPTFGQGTKVEIK

SEQ ID NO: 1761 - protein, 109 aa, Homo sapiens
DIVMTQSPATLSLSPGERATLSCRASQSVSSFLAWYQQKPGQAPRLLIYDASNRATGIPARFSGSGSGTDFTLTISSLEPEDFAVYYCQQRSNWPPRLTFGGGTKVDIK

SEQ ID NO: 1762 - protein, 107 aa, Homo sapiens
QSALTQPASVSGSPGQSITISCTGTSSDVGSYNLVSWYQQHPGKAPKLMIYDSSKRPSGVSNRFSGSKSGNTASLTISGLQAEDEADYYCCSYAGSVFGGGTKLTVL

SEQ ID NO: 1763 - protein, 113 aa, Homo sapiens
QTVVTQPASVSGSPGQSITISCTGTSSDVGGYNYVSWYQQHPGKAPKLMIYDVSNRPSGVSNRFSGSKSGNTASLTISGLQAEDEADYYCSSYTSSSTLGLYVFGTGTKVTVL

SEQ ID NO: 1764 - protein, 111 aa, Homo sapiens
QSVLTQPPSVSGAPGQRVTISCTGSSSNIGAGYDVHWYQQLPGTAPKVLIYDNNNRPSGVPDRFSGSKSGTSASLAITGLQAEDEADYYCQSYDSSLSGSVFGGGTKLTVL

SEQ ID NO: 1765 - protein, 107 aa, Homo sapiens
DIQLTQSPSSLSASVGDRVTITCRASQGIRNDLGWYQQKPGKAPKRLIYAASSLQSGVPSRFSGSGSGTEFTLTISSLQPEDFATYYCLQHNSYPLTFGGGTKVDIK

SEQ ID NO: 1766 - protein, 110 aa, Homo sapiens
QSALTQPASVSGSPGQSITISCTGTSSDVGSYNLVSWYQQHPGKAPKLMIYEVTKRPSGVSNRFSGSKSGNTASLTISGLQAEDEADYYCCSYAGSSTWVFGGGTKLTVL

SEQ ID NO: 1767 - protein, 110 aa, Homo sapiens
QSVLTQPASVSGSPGQSITISCTGTSSDVGSYNLVSWYQQHPGKAPKLMIYEASKRPSGISNRFSGSKSGNTASLTISGLQAEDEADYYCCSYAGSSTWVFGGGTKPTVL

SEQ ID NO: 1768 - protein, 108 aa, Homo sapiens
DIVMTQSPATLSVSPGERATLSCRASQSVSSNLAWYQQKPGQAPRLLIYGASTRATGIPARFSGSGSGTEFTLTISSLQPEDFAVYYCQQCYNWPPWTFGQGTRVEFK

SEQ ID NO: 1769 - protein, 107 aa, Homo sapiens
DIVMTQSPSSLSASVGDRVTITCRASQGIRNDLGWYQQKPGKAPKRLIYAASSLQSGVPSRFSGSGSGTEFTLTISSLQPEDFATYYCLQHNSYPLTFGGGTKLEIK

SEQ ID NO: 1770 - protein, 108 aa, Homo sapiens
AIRMTQSPSSLSASVGDRVTITCRASQSISSYLNWYQQKPGKAPKLLIYAASSLQSGVPSRFSGSGSGTDFTLTISSLQPEDFATYYCQQSYTTFIYTFGQGTKLEIK

SEQ ID NO: 1771 - protein, 108 aa, Homo sapiens
DIVMTQSPGTLSLSPGERATLSCRASQSVSSSYLAWYQQKPGQAPRLLIYGASSRATGIPDRFSGSGSGTDFTLTISRLEPEDFAVYYCQQYGSSPYTFGQGTKVEIK

SEQ ID NO: 1772 - protein, 108 aa, Homo sapiens
AIRMTQSPSSLSASVGDRVTITCQASQDISNYLNWYQQKPGKAPKLLIYDASNLETGVPSRFSGSGSGTDFTFTISSLQPEDIATYYCQQYDNLLSLTFGGGTKVEIK

SEQ ID NO: 1773 - protein, 114 aa, Homo sapiens
EIVLTQSPDSLAVSLGERATINCKSSQSVLYSSNNKNYLAWYQQKPGQPPKLLIYWASTRESGVPDRFSGSGSGTHFTLTISSLQAEDVAVYYCQQYYSTPPLTFGGGTKVDIK

SEQ ID NO: 1774 - protein, 106 aa, Homo sapiens
EIVMTQSPSSLSASVGDRVTITCRASQSMSSYLNWYQQKPGKAPKLLIYAASSLQSGVPSRFSGSGSGTDFTLTISSLQPEDFATYYCQQSYSTLTFGGGTKVEIK

SEQ ID NO: 1775 - protein, 108 aa, Homo sapiens
QTVVTQPPSVSVSPGQTARITCSGDALPKQYAYWYQQKPGQAPVLVIYKDSERPSGIPERFSGSSSGTTVTLTISGVQAEDEADYYCQSADSSGTYRVFGGGTKLTVL

SEQ ID NO: 1776 - protein, 108 aa, Homo sapiens
QPVLTQPPSVSVAPGQTARITCGGNNIGSKSVHWYQQKPGQAPVLVVYDDSDRPSGIPERFSGSNSGNTATLTISRVEAGDEADYYCQVWDSSSDHYVFGTGTKVTVL

SEQ ID NO: 1777 - protein, 112 aa, Homo sapiens
NFMLTQPPSASGTPGQRVTISCSGSSSNIGSNTVNWYQQLPGTAPKLLIYSNNQRPSGVPDRFSGSKSGTSASLAISGLQSEDEADYYCAAWDDSLNGPHWVFGGGTKLTVL

SEQ ID NO: 1778 - protein, 113 aa, Homo sapiens
DVVMTQSPDSLAVSLGERATINCKSSQSVLYSSNNKNYLAWYQQKPGQPPKLLIYWASTRESGVPDRFSGSGSGTDFTLTISSLQAEDVAVYYCQQYYSTPLTFGGGTKVDIK

SEQ ID NO: 1779 - protein, 108 aa, Homo sapiens
EIVLTQSPGTLSLSPGERATLSCRASQSVSSSYLAWYQQKPGQAPRLLIYGASSRATGIPDRFSGSGSGTDFTLTISRLEPEDFAVYYCQQYGSSPFTFGPGTKLEIK

SEQ ID NO: 1780 - protein, 107 aa, Homo sapiens
DIVMTQSPSSLSASVGDRVTITCRASQSISSYLNWYQQKPGKAPKLLIYAASSLQSGVPSRFSGSGSGTDFTLTISSLQPEDFATYYCQQSYSTPLTFGPGTKLEIK

SEQ ID NO: 1781 - protein, 106 aa, Homo sapiens
DIVMTQSPSSLSASVGDRVTITCRASQSMSSYLNWYQQKPGKAPKLLIYAASSLQSGVPSRFSGSGSGTDFTLTISSLQPEDFATYYCQQSYSTLTFGGGTKLEIK

SEQ ID NO: 1782 - protein, 113 aa, Homo sapiens
DIVMTQSPDSLAVSLGERATINCKSSQSVLYSSNNKNYLAWYQQKPGQPPKLLIYWASTRESGVPDRFSGSGSGTDFTLTISSLQAEDVAVYYCQQYYSTPITFGQGTRLEIK

SEQ ID NO: 1783 - protein, 113 aa, Homo sapiens
DIQLTQSPDSLAVSLGERATINCKSSQSVLYSSINKNYLAWYQQKPGQPPKLLIYWASTRESGVPDRFSGSGSGTDFTLTISSLQAEDVAVYYCQQYYSTPYTFGQGTKVEIK

SEQ ID NO: 1784 - protein, 110 aa, Homo sapiens
QSVLTQPPSASGTPGQRVTISCSGSSSNIGSNTVNWYQQLPGTAPKLLIYSNNQRPSGVPDRFSGSKSGTSASLAISGLQSEDEADYYCAAWDDSLNGPVFGGGTKLTVL

SEQ ID NO: 1785 - protein, 108 aa, Homo sapiens
EIVLTQSPGTLSLSPGERATLSCRASQSVSSIYLAWYQQKPGQAPRLLIYGASSRATGIPDRFSGSGSGTDFTLTISRLEPEDFAVYYCQQYAGSPWTFGQGTKVEIK

SEQ ID NO: 1786 - protein, 109 aa, Homo sapiens
EIVLTQSPATLSLSPGERATLSCRASQSVSSYLAWYQQKPGQAPRLLIYDASNRATGIPARFSGSGSGTDFTLTISSLEPEDFAVYYCQQRSNWPPIFTFGPGTKVDIK

SEQ ID NO: 1787 - protein, 112 aa, Homo sapiens
DVVMTQSPLSLPVTLGQPATISCRSSQSLVYSDGNTYVNWFQQRPGQSPRRLIYQVSIRASGVPDRFSGSGSGTDFALKISRVEAEDVGVYYCMQGTHWPVTFGQGTKVEIK

SEQ ID NO: 1788 - protein, 107 aa, Homo sapiens
DIQMTQSPSSLSASVGDRVTITCRASQNIDNYLNWYQQKPGKAPKLLIYAASRLHSGVPSRFSGSGSGTDFTLIISSLQPEDLATYYCQQSYSNPLTFGPGTKVDIR

SEQ ID NO: 1789 - protein, 110 aa, Homo sapiens
QSALTQPRSVSGSPGQSVTISCTGTSSDVGGYNYVSWYQQHPGKAPKLMIYDVSKRPSGVPDRFSGSKSGNTASLTISGLQAEDEADYYCCSYAGSYTWVFGGGTKLTVL

SEQ ID NO: 1790 - protein, 108 aa, Homo sapiens
EIVLTQSPGTLSLSPGERATLSCRASQSVSSSYLAWYQQKPGQAPRLLIYGASSRATGIPDRFSGSGSGTDFTLTISRLEPEDFAVYYCQQYGSSRGTFGQGTKVEIK

SEQ ID NO: 1791 - protein, 110 aa, Homo sapiens
QSALTQPASVSGSPGQSITISCTGTSSDVGSYNLVSWYQQHPGKAPKLMIYEGSKRPSGVSNRFSGSKSGNTASLTISGLQAEDEADYYCCSYAGSSTYVFGTGTKVTVL

SEQ ID NO: 1792 - protein, 111 aa, Homo sapiens
QSVLTQPPSVSAAPGQKVTISCSGSSSNIGNNYVSWYQQLPGTAPKLLIYDNNKRPSGIPDRFSGSKSGTSATLGITGLQTGDEADYYCGTWDSSLSAGPVFGGGTKLTVL

SEQ ID NO: 1793 - protein, 110 aa, Homo sapiens
EIVLTQSPGTLSLSPGERATLSCRASQSVSSSYLAWYQQKPGQAPRLLIYGASSRATGIPDRFSGSGSGTDFTLTISRLEPEDFAVYYCQQYGSSPPKYTFGQGTKLEIK

SEQ ID NO: 1794 - protein, 109 aa, Homo sapiens
EIVMTQSPATLSVSPGERATLSCRASQSVSSNLAWYQQKPGQAPRLLIYGASTRATGIPARFSGSGSGTEFTLTISSLQSEDFAVYYCQQYNNWPPSLTFGGGTKVEIK

SEQ ID NO: 1795 - protein, 107 aa, Homo sapiens; identical to SEQ ID NO: 1216

SEQ ID NO: 1796 - protein, 111 aa, Homo sapiens
QLVLTQSPSASASLGASVKLTCTLSSGHSSYAIAWHQQQPEKGPRYLMKLNSDGSHSKGDGIPDRFSGSSSGAERYLTISSLQSEDEADYYCQTWGTGIRVFGGGTKLTVL

SEQ ID NO: 1797 - protein, 108 aa, Homo sapiens
SYELTQPPSVSVSPGQTARITCSGDALPKQYAYWYQQKPGQAPVLVIYKDSERPSGIPERFSGSSSGTTVTLTISGVQAEDEADYYCQSADSSGTYVVFGGGTKLTVL

SEQ ID NO: 1798 - protein, 111 aa, Homo sapiens
QSVLTQPPSVSAAPGQKVTISCSGSSSNIGNNYVSWYQQLPGTAPKLLIYDNNKRPSGIPDRFSGSKSGTSATLGITGLQTGDEADYYCGTWDSSLSASYVFGTGTKVTVL

SEQ ID NO: 1799 - protein, 107 aa, Homo sapiens
EIVMTQSPATLSVSPGERATLSCRASQSVSSNLAWYQQKPGQAPRLLIYGASTRATGIPARFSGSGSGTEFTLTISSLQSEDFAVYYCQQYNNWPYTFGQGTKLEIK

SEQ ID NO: 1800 - protein, 107 aa, Homo sapiens
DIQMTQSPSSLSASVGDRVTITCRASQGIRNDLGWYQQKPGKAPKRLIYAASSLQSGVPSRFSGSGSGTEFTLTISSLQPEDFATYYCLQHNSYPFTFGPGTKVDIK

SEQ ID NO: 1801 - protein, 111 aa, Homo sapiens
QSALTQPASVSGSPGQSITISCTGTSSDVGGYNYVSWYQQHPGKAPKLMIYDVSNRPSGVSNRFSGSKSGNTASLTISGLQAEDEADYYCSSYTSSSTPYVFGTGTKVTVL

SEQ ID NO: 1802 - protein, 107 aa, Homo sapiens; identical to SEQ ID NO: 1788

SEQ ID NO: 1803 - protein, 108 aa, Homo sapiens
EIVLTQSPGTLSLSPGERATLSCRASQSVSSSYLAWYQQKPGQAPRLLIYGASSRATGIPDRFSGSGSGTDFTLTISRLEPEDFAVYYCQQYGSSPQTFGQGTKLEIK

SEQ ID NO: 1804 - protein, 111 aa, Homo sapiens; identical to SEQ ID NO: 1798

SEQ ID NO: 1805 - protein, 110 aa, Homo sapiens
QSVLTQPPSVSAAPGQKVTISCSGSSSNIGNNYVSWYQQLPGTAPKLLIYDNNKRPSGIPDRFSGSKSGTSATLGITGLQTGDEADYYCGTWDSSLSAVVFGGGTKLTVL

SEQ ID NO: 1806 - protein, 112 aa, Homo sapiens
QSVLTQPPSVSGAPGQRVTISCTGSSSNIGAGYDVHWYQQLPGTAPKLLIYGNSNRPSGVPDRFSGSKSGTSASLAITGLQAEDEADYYCQSYDSSLSGPVVFGGGTKLTVL

SEQ ID NO: 1807 - protein, 108 aa, Homo sapiens
SYELTQPHSVSVATAQMARITCGGNNIGSKAVHWYQQKPGQDPVLVIYSDSNRPSGIPERFSGSNPGNTATLTISRIEAGDEADYYCQVWDSSSDHVVFGGGTKLTVL

SEQ ID NO: 1808 - protein, 110 aa, Homo sapiens; identical to SEQ ID NO: 1784

SEQ ID NO: 1809 - protein, 108 aa, Homo sapiens
SYELTQPPSVSVSPGQTARITCSGDALPKQYAYWYQQKPGQAPVLVIYKDTERPSGIPERFSGSSSGTTVTLTISGVQAEDEADYYCQSADSSGTYMIFGTGTKVTVL

SEQ ID NO: 1810 - protein, 107 aa, Homo sapiens
DIQMTQSPSSLSASVGDRVTITCQASQDISNYLNWYQQKPGKAPKLLIYDASNLETGVPSRFSGSGSGTDFTFTISSLQPEDIATYYCQQYDNLPRFGPGTKVDIKR

SEQ ID NO: 1811 - protein, 108 aa, Homo sapiens
EIVLTQSPATLSLSPGERATLSCRASQSVSSYLAWYQQKPGQAPRLLIYDASNRATGIPARFSGSGSGTDFTLTISSLEPEDFAVYYCQQRSNWPPITFGQGTRLEIK

SEQ ID NO: 1812 - protein, 112 aa, Homo sapiens
DVVMTQSPLSLPVTLGQPASISCRSSQSLVYSDGNTYVNWFQQRPGQSPRRLIYKVSNRDSGVPDRFSGSGSGTDFALKISRVEAEDVGVYYCMQGTHWPVTFGQGTKVEIK

SEQ ID NO: 1813 - protein, 105 aa, Homo sapiens
DIQMTQSPSTLSASVGDRVTITCRASQSISSWLAWYQQKPGKAPKLLIYKASSLESGVPSRFSGSGSGTEFTLTISSLQPDDFATYYCQQYNSYTFGQGTKLEIK

SEQ ID NO: 1814 - protein, 107 aa, Homo sapiens; identical to SEQ ID NO: 1203

SEQ ID NO: 1815 - protein, 107 aa, Homo sapiens
EIVMTQSPATLSVSPGERATLSCRASQSVSSNLAWYQQKPGQAPRLLIYGASTRATGIPARFSGSGSGTEFTLTISSLQSEDFAVYYCQQYNNWPLTFGGGTKVEIK

SEQ ID NO: 1816 - protein, 107 aa, Homo sapiens
DIQMTQSPSSLSASVGDRVTITCRASQSISSYLNWYQQKPGKAPKFLIYAASSLQSGVPSRFSGSGSGTDFTLTISSLQPEDFATYYCQQTYITAFTFGPGTKVDIK

SEQ ID NO: 1817 - protein, 110 aa, Homo sapiens; identical to SEQ ID NO: 1261

SEQ ID NO: 1818 - protein, 108 aa, Homo sapiens
SYELTQPPSVSVSPGQTARITCSGDALPKQYAYWYQQKPGQAPVVVIYKDSERPSGIPERFSGSSSGTTVTLTISGVQAEDEADYYCQSADSSGTYVVFGGGTKLTVL

SEQ ID NO: 1819 - protein, 111 aa, Homo sapiens
QSVLTQPPSVSGAPGQRVTISCTGSSSNIGAGYDVHWYQQLPGTAPKLLIYGNSNRPSGVPDRFSGSKSGTSASLAITGLQAEDEADYYCQSYDSSLTLYVFGTGTKVTVL

SEQ ID NO: 1820 - protein, 112 aa, Homo sapiens
DVVMTQSPLSLPVTLGQPASISCRSSQSLVYSDGNTYVNWFQQRPGQSPRRLIYQVSIRASGVPDRFSGSGSGTDFALKISRVEAEDVGVYYCMQGTHWPVTFGQGTKVEIK

SEQ ID NO: 1821 - protein, 107 aa, Homo sapiens; identical to SEQ ID NO: 1203

SEQ ID NO: 1822 - protein, 112 aa, Homo sapiens
DVVMTQSPLSLPVTLGQPASISCRSSQSLVYSDGNTYLNWFQQRPGQSPRRLIYKVSNRDSGVPDKFSGSGSGTDFTLKISRVEAEDVGVYYCMQGTHWPPTFGQGTKVEIK

SEQ ID NO: 1823 - protein, 113 aa, Homo sapiens
DIVMTQSPDSLAVSLGERATINCKSSQNVLYSSNNKNYLAWYQQKPGQPPKLLIYWASTRESGVPDRFSGSGSGTDFTLTISSLQAEDVAVYYCQQYYITPYTFGQGTKLEIK

SEQ ID NO: 1824 - protein, 108 aa, Homo sapiens
SYELTQPPSVSVSPGQTARITCSGDALPKKYAYWYQQKSGQAPVLVIYEDSKRPSGIPERFSGSSSGTMATLTISGAQVEDEADYYCYSTDSSGNLYVFGTGTKVTVL

SEQ ID NO: 1825 - protein, 105 aa, Homo sapiens; identical to SEQ ID NO: 1813

SEQ ID NO: 1826 - protein, 108 aa, Homo sapiens
EIVLTQSPGTLSLSPGERATLSCRASQSVSSSYLAWYQQKPGQAPRLLIYGASSRATGIPDRFSGSGSGTDFTLTISRLEPEDFAVYYCQQYGSSPGTFGQGTRLEIK

SEQ ID NO: 1827 - protein, 110 aa, Homo sapiens
QSALTQPASVSGSPGQSITISCTGTSSDVGGYNYVSWYQQHPGKAPKLMIYDVSNRPSGVSNRFSGSKSGNTASLTISGLQAEDEADYYCSSYTSISTWVFGGGTKLTVL

SEQ ID NO: 1828 - protein, 108 aa, Homo sapiens
DIQMTQSPSSLSASVGDRVTITCRASQSISSYLNWYQQKPGKAPKLLIYAASSLQSGVPSRFSGSGSGTDFTLTISSLQPEDFATYYCQQSYSTLALTFGGGTKVEIK

SEQ ID NO: 1829 - protein, 110 aa, Homo sapiens
QSALTQPPSASGSPGQSVTISCTGTSSDVGGYNYVSWYQQHPGKAPKLMIYEVSKRPSGVPDRFSGSKSGNTASLTVSGLQAEDEADYYCSSYAGSNNLVFGGGTKLTVL

SEQ ID NO: 1830 - protein, 108 aa, Homo sapiens
EIVLTQSPGTLSLSPGERATLSCRASQSVSSSYLAWYQQKPGQAPRLLIYGASSRATGIPDRFSGSGSGTDFTLTISRLEPEDFAVYYCQQYGSSPGTFGQGTKVEIK

SEQ ID NO: 1831 - protein, 107 aa, Homo sapiens
DIQMTQSPSSLSASVGDRVTITCQASQDVSNYLNWYQQQPGKAPKLLIYDAFNLETGVPSRFSGSGSGTDFTFTISSLQPEDIATYYCQQYDNLPLTFGGGTKVEIK

SEQ ID NO: 1832 - protein, 107 aa, Homo sapiens; identical to SEQ ID NO: 1831

SEQ ID NO: 1833 - protein, 113 aa, Homo sapiens
DIQMTQSPLSLPVTPGEPASISCRSSQSLLDSDDGNTYLDWYLQKPGQSPQLLIYTLSYRASGVPDRFSGSGSGTDFTLKISRVEAEDVGVYYCMQRIEFPLTFGGGTKVEIK

SEQ ID NO: 1834 - protein, 109 aa, Homo sapiens
EIVLTQSPATLSLSPGERATLSCRASLSLSSYLAWYQQKPGQAPRLLIYDASNRATGIPARFSGSGSGTDFTLTISSLEPEDFAVYYCQQRSNWPPTWTFGQGTKAEIK

SEQ ID NO: 1835 - protein, 108 aa, Homo sapiens
EIVLTQSPGTLSLSPGERATLSCRASQSVSSSYLAWYQQKPGQAPRLLIYGASSRATGIPDRFSGSGSGTDFTLTISRVEPEDFAVYYCQQYGSSPWTFGQGTKVEIK

SEQ ID NO: 1836 - protein, 107 aa, Homo sapiens
DIQMTQSPSTVSASVGDRVTITCRASQSIDNWLAWYQEKPGKAPKVLIYKASSLESGVPSRFSGRGSGTEFTLTISSLQPGDFATYYCQHYHSFPLTFGGGTKVDIK

SEQ ID NO: 1837 - protein, 107 aa, Homo sapiens
EIVLTQSPGTLSLSPGERATLSCRASQSVSSYLAWYQQKPGQAPRLLIYGVSSRATGIPDRFSGSGSGTDFTLTISRLEPEDFAVYYCQQYGSSPRTFGQGTKVEIK

SEQ ID NO: 1838 - protein, 107 aa, Homo sapiens
EIVLTQSPGTLSLSPGERATLSCRASQSVSSYLAWYQQKPGQAPRLLISGASSRAAGIPDRFSGSGSGTDFTLTINRLEPEDFAVYYCQQYGSSPRTFGQGTKLEIK

SEQ ID NO: 1839 - protein, 107 aa, Homo sapiens
EIVLTQSPGTLSLSPGERATLSCRASQSVSSSYLAWYQQKPGQAPRLLIYGASSRATGIPDRFSGSGSGTDFTLTISRLEPEDFAVYYCQQYGRSPWTFGQGTKVEI

SEQ ID NO: 1840 - protein, 107 aa, Homo sapiens
DIQMTQSPSSLSASVGDRATITCRASQSISSYLNWYQEKPGKAPKLLIYAASSLQSGVPSRFSGSGSGTDFTLTISSLQPEDFATYYCQQSYSNPLTFGGGTKVEIK

SEQ ID NO: 1841 - protein, 112 aa, Homo sapiens
QPVLTQPPSVSGAPGQRITISCTGSSSNIGAGYDVHWYQQLPGTAPKLLIYGSSSRPSGVPDRFSGSKSGTSASLAITGLQAEDEADYYCQSYDSSLSVLYVFGTGTKVTVL

SEQ ID NO: 1842 - protein, 108 aa, Homo sapiens
DIVLTQTPATLSVSPGEGATLSCRASQSVRSNLAWFQQRPGQVPRLLIYDASTRATGVPARFTGSGSGTYFTLTISSLQSEDFAVYYCQQYNSWPPLTFGGGTKLEIK

SEQ ID NO: 1843 - protein, 106 aa, Homo sapiens
EIVMTQSPATLSVSPGETATLSCRASQSVGRFMGWYQQKPGQAPRLLIFDASNRVTGVPDRFRGSGSGTDFILTINSLEPEDSASYYCQRRGDGYNFGQGTKVEIK

SEQ ID NO: 1844 - protein, 112 aa, Homo sapiens
ETTLTQSPLSLPVTLGQPASISCRSSQGLVHSDGNTYLNWFQQRPGQSPRRLIYKVSNRDSGVPDRFSGSGSGTDFTLKISRVEAEDIGVYYCMQGTEWPRTFGQGTKVEIK

SEQ ID NO: 1845 - protein, 112 aa, Homo sapiens
DIRVTQSPLSLPVTLGQPASISCRSSQRIVHTDGNTYLNWFLQRPGQSPRRLIYKVSNRDSGVPDRFSGSGSGTDFTLKISRVEAEDVGIYYCMQGTEWPRTFGQGTKVDIK

SEQ ID NO: 1846 - protein, 107 aa, Homo sapiens
EIVMTQSPSSLSASVGDRVTITCRAGHTISTYLNWYQQKPGKAPKILISGASSLQSGVPSRFSGSGSGTDFTLTIGSLQPEDFATYYCQQSYSTPYTFGQGTKVDIK

SEQ ID NO: 1847 - protein, 110 aa, Homo sapiens
QPVLTQPASVSGSPGQSSTLSCSGTSSDVGSYDLVSWYQQHPGKAPKLMIYEGTKRPSGVSDRFSGSTSGNTASLTISGLQAEDEANYYCCSYAGSGTWIFGGGTKLTVL

SEQ ID NO: 1848 - protein, 108 aa, Homo sapiens
EIVLTQSPGTLSLSPGDRVTLFCRASQNIANNHLAWYQQKPGQAPRVLIYGASTTATDIPDRFSGRVSGTDFTLTISRLDPEDFAVYYCHQYGSSPWTFGQGTKLEIK

SEQ ID NO: 1849 - protein, 106 aa, Homo sapiens
ETTLTQSPATLSVSPGETATLSCRASQSVGRFMGWYQQKPGQAPRLLIFDASNRVTGVPDRFRGSGSGTDFILTINSLEPEDSASYYCQRRGDGYNFGQGTKVEIK

SEQ ID NO: 1850 - protein, 112 aa, Homo sapiens
DIRMTQSPLSLPVDLGQSASISCRSSQRVVHTNGNTYLHWFHQRPGQAPRRLIYKVSNRESGVPDRFSGSGSGTDFTLRISRVEAEDVGVYYCMQATDWPRTFGQGTKLEIK

SEQ ID NO: 1851 - protein, 112 aa, Homo sapiens
DIVMTQSPLSLSVTLGQAASISCTCSQTAVHSDGNTYLNWFHQRPGQSPRRLIYKVSNRDSGVPDRFSGSGSGTDFTLKINRVEAEDVGIYYCMQTTDWPRTFGQGTKVEIK

SEQ ID NO: 1852 - protein, 112 aa, Homo sapiens
ETTLTQSPVTLPVTLGQPASISCTSSRWLVHTNGNTYLNWFHQRPGQSPRRLIYQVSNRDSGVPDRFSGSGSGTDFTLQISRVEAEDVGVYYCMQGTEWPRTFGQGTKLEIK

SEQ ID NO: 1853 - protein, 107 aa, Homo sapiens
EIVLTQSPSSLSASVGDRVTITCQASQDIRKCLNWYQHIPGKAPKLLIHDASSLESGVPSRFSGSGSGTDFSFTINSLHPEDIATYYCQQFEDLPITFGQGTRLEIK

SEQ ID NO: 1854 - protein, 113 aa, Homo sapiens
DIVMTQSPDSLAVSLGERATINCKSSQSVLYSSNNKNYLAWYQQKPGQPPKLLIYWASTRESGVPDRFSGSGSGTDFTLTISSLQAEDVAVYYCQQYYSTPYTFGQGTKVEIK

SEQ ID NO: 1855 - protein, 109 aa, Homo sapiens
DIVVTQSPGTLSLSPGERAALSCRASQSVGNNYLAWYQQKPGQAPRLLIYGATSRATGIPDRFSGSGSGTDFTLTISRLEPEDFAVYYCQQYGTSPVYTFGQGTKVEIK

SEQ ID NO: 1856 - protein, 110 aa, Homo sapiens
QPVLTQPPSVSAAPGQKVTISCSGSSSNIENNYVSWYQQLPGAAPKLLIYDNNKRPSGIPDRFSGSKSGTSATLGITGLQTGDEADYYCGTWDFSLSAGVFGGGTKLTVL

SEQ ID NO: 1857 - protein, 112 aa, Homo sapiens
ETTLTQSPLSLPVTLGQPASISCRSSQGLVHTNGNLYLNWFHQRPGQSPRRLIYQVSNRDSGVPDRFSGSGSGTDFTLRISRVEAEDVGIYYCMQGTEWPRTFGQGTKVEIK

SEQ ID NO: 1858 - protein, 106 aa, Homo sapiens
DIQLTQSPSTLSASVGDSVTITCRASQSISSWLAWYQQKPGKAPKLLIYKASSLETGVPSRFSGSGSGTEFTLTISSLQPDDFATYYCQQYKSPLSFGGGTKVEIK

SEQ ID NO: 1859 - protein, 108 aa, Homo sapiens
DIQVTQSPATLSLSPGERATLSCRASQSVSSYLAWYQQKPGQAPRLLIYDASKRATGIPARFSGSGSGTDFTLTISSLEPEDFAVYYCQQRSDWHPITFGQGTRLEIK

SEQ ID NO: 1860 - protein, 106 aa, Homo sapiens
DIQVTQSPSSLSASVGDRVTITCRASQSISSSLNWYQQKPGKAPTLLIYTASNLQSGVPSRFSGSGSGTDFTLTITSLQPEDFATYYCQQSYSTPGFGPGTKVDIK

SEQ ID NO: 1861 - protein, 109 aa, Homo sapiens
EIVMTQSPATLSLSPGERATLSCRASQSVSIYLAWYQQKPGQAPRLLIYDASNRATGVPARFSGSGSGTDFTLTINNLEPEDFAIYYCQQRAKWPPRVTFGPGTKVDIK

SEQ ID NO: 1862 - protein, 109 aa, Homo sapiens
DIVLTQSPATLSLSPGERATLSCRASQSVSIYLAWYQQKPGQAPRLLIYDASNRATGIPARFSGSGSGTDFTLTINNLEPEDFAIYYCQQRAKWPPRVIFGPGTKVEIK

SEQ ID NO: 1863 - protein, 108 aa, Homo sapiens
SYELTQPPSVSVSPGQTARITCSGDALPRRYAYWYQQRSGQAPVLVIYEDNKRPSGIPERFSAFSSGTMATLTISGAQVEDEADYYCYSTDSTANYKVFGGGTKLTVL

SEQ ID NO: 1864 - protein, 112 aa, Homo sapiens
ETTLTQSPLSLPVTLGQPASISCRSSQGLVHSNGNTYVNWFHQRPGQSPRRLIYEVSNRDSGVPDRFSGSGSGTDFTLKISRVEAEDIGVYYCMQGTEWPRTFGQGTKVDIK

SEQ ID NO: 1865 - protein, 112 aa, Homo sapiens
QSVLIQPASVSGSPGQSITISCTGSSSDVGSYNLVSWYQQHPGKAPKLMIYEGYKRPSGVSNRFSGSKSGNTASLTISGLQAEDEADYYCCSYAGSSAVVVVFGGGTKLTVL

SEQ ID NO: 1866 - protein, 113 aa, Homo sapiens
DIRVTQSPDSLAVSLGERATINCRTSQSVLYSSNNKNYLGWYQQKPGQPPKLLIYWASTRESGVPDRFSGSGSGTDFTLTISSLQAEDVAVYYCQQYYSTPYTFGQGTKVDIK

SEQ ID NO: 1867 - protein, 108 aa, Homo sapiens
EIVLTQSPATLSLSPGERATLSCRASQSVSTYLAWYQQKPGQAPRLLIYDASNRATGIPARFSGSGSGTDFTLTISSLEPEDFALYYCLQRSDWHPITFGQGTRLEIK

SEQ ID NO: 1868 - protein, 109 aa, Homo sapiens
DIQLTQSPATLSLSPGERATLSCRANQSVSNFLAWYQQKPGQAPRHLIYDASNRATGIPARFSGSGSGTDFTLTISSLEPEDFAVYYCQQRSNWPPRLTFGGGTKVEIK

SEQ ID NO: 1869 - protein, 107 aa, Homo sapiens
DIVMTQTPGTLSVSPGERATLSCRASQIINRSQLGWYQHKPGQPPRLLIFDSSKRATGTPDRFSASGSETDFTLTISGVEPEDSGVYYCLQYSLATTFGPGTKVEIK

SEQ ID NO: 1870 - protein, 112 aa, Homo sapiens
QPVLTQSSSASASLGSSVKLTCTLSSGHSSYILAWHQQQPGKAPRFLMKFEVGGRYNKGSGVPDRFSGSSSGADRYLTISNLQSEDEADYYCETWDSNLKGVFGGGTKVTVL

SEQ ID NO: 1871 - protein, 112 aa, Homo sapiens
QPVLTQSSSASASLGSSVKLTCTLRSGHSSYIIAWHQQQPGKAPRFLMKVGHSGSYNKGSGVPDRFSGSRSGADHYLTISNLQPDDEADYYCEAWDNNNLGVFSGGTKVTVL

SEQ ID NO: 1872 - protein, 107 aa, Homo sapiens
DIQLTQSPSAMSASVGDRVTITCRASQGINDNLAWFQQKPGKVPKRLIYAASNLQNGVPSRFSGSGSGTEFTLTISSLQPEDFATYYCLQHNSYPLTFGGGTKLEIK

SEQ ID NO: 1873 - protein, 113 aa, Homo sapiens
DIRMTQSPLSLPVTPGEPASISCRSSQSLLHSNGYNYLDWYLQKPGQSPQLLIYLGSNRASGVPDRFSGSGSGTDFTLKISRVEAEDVGVYYCMQALQTPGVTFGGGTKVDIK

SEQ ID NO: 1874 - protein, 110 aa, Homo sapiens
QPVLTQPPSASGTPGQRVTISCSGSYSNIGTNPANWYQQLPGTAPKLLIYNNDQRPSGVPDRFSGSKSGTSASLAISGLQSEDETDYYCATWDDSLNGVVFGGGTKLTVL

SEQ ID NO: 1875 - protein, 112 aa, Homo sapiens
DIRMTQSPLSLPVTRGQPASISCRSSHNVVHSDGKTYLNWFHQRPGQAPRRLIYQVSKRDSGVPDRFSGSGSGSDFTLTISRVEAEDVGVYYCMQGTDWPRSFGGGTKVEIK

SEQ ID NO: 1876 - protein, 107 aa, Homo sapiens
EIVLTQSPSSLSASVGDRVTITCRASRSISSYLNWYQQKPGKAPNLLIYDASTLQSGVPSRFSGSGSGTDFSLTISSLQPEDFATYYCLHTYTTPRTFGQGTKVEIK

SEQ ID NO: 1877 - protein, 108 aa, Homo sapiens
EIVLTQSPATLSVSPGERITLSCRASHSVSSNLAWYQQKPGQVPRLLIYGASARATGIPARFSGSGSGTEFTLTISSLQSEDFAVYYCQQYNYWPPLTFGGGTKVEIK

SEQ ID NO: 1878 - protein, 107 aa, Homo sapiens
DIQMTQSPSSLSASVGDRVTITCRASQSISTYLNWYQQKTGKAPELLIYVASSLQSGVPSRFSGSGSGTDFTLTISSLQPEDFATYYCQQSYRFPITFGQGTRLEIK

SEQ ID NO: 1879 - protein, 108 aa, Homo sapiens
EIVLTQSPATLSLSPGERATLSCRASQSVGTYLAWYQQKHGQAPRLLISDVSKRATGIPARFSGSGSGTDFTLTITSLEPEDFAVYYCQQRTNWPGATFGPGTKVDIK

SEQ ID NO: 1880 - protein, 111 aa, Homo sapiens
QPVLTQSPSASASLGGSVKLTCTLTSGHSTYAIAWHQQQPEKGPRFLMKLNSDGSHNKGDGIPDRFSGSSSGAERYLTISSLQSEDEADYYCHTWGTDIQVFGGGTKLTVL

SEQ ID NO: 1881 - protein, 110 aa, Homo sapiens
NFMLTQPHSVSESPGKTVTISCTRSSGSIANNYVQWLQQRPGSSPTTIIYEDNQRPSGVPDRFSGSIDASSNSASLTISGLKTEDEADYYCQSYDSSSQVFGGGTKVTVL

SEQ ID NO: 1882 - protein, 108 aa, Homo sapiens
DIVLTQSPATLSVSPGERITLSCRASHSVSSNLAWYQQKPGQVPRLLIYGASARATGIPARFSGSGSGTEFTLTISSLQSEDFAVYYCQQYNYWPPLTFGGGTKVEIK

SEQ ID NO: 1883 - protein, 112 aa, Homo sapiens
ETTLTQSPLSLSVTLGQAASISCRPNLGLMHTDGNTYLNWFHQRPGQSPRRLIYKVSNRDSGVPDRFAGSGSGTHFTLEISGVEADDVGVYYCMQGTEWPRTFGQGTKLEIK

SEQ ID NO: 1884 - protein, 106 aa, Homo sapiens
DIRMTQSPSTLSASVGDRVTITCRASQTIGSWLAWYQQKPGKAPNLLIYKASSLESGVPSRFSGSGSGTEFTLTISSLQPDDFATYYCQQYNSLYTFGQGTKLEIK

SEQ ID NO: 1885 - protein, 108 aa, Homo sapiens
ETTLTQSPGTLSVSPGERATLSCRASQSVISNLAWYQQKPGQAPRLLIYGASTRATGVPARFSGSGSGTEFTLTIASLQSEDFAVYYCQQYHHWPPYTFGQGTKVDIK

SEQ ID NO: 1886 - protein, 114 aa, Homo sapiens
EIVLTQSPDSLAVSLGERATINCKSSQSVLYSSNNENCLAWYQQKPGQPPKLLIYWASTRESGVPDRFSGSGSGTDFTLTISSLQAEDVAVYYCQQYCSTPPYTFGQGTKVDIK

SEQ ID NO: 1887 - protein, 112 aa, Homo sapiens
EIVMTQSPLSLPVSLGQPASISCRSSQSVIHTDGNTYLNWYHQRPGQSPRRLIYKVSNRDSGVPDRFSGSGSVTDFTLKISRVEAEDVGVYYCMQGTEWPRTFGQGTKVEIK

SEQ ID NO: 1888 - protein, 112 aa, Homo sapiens
DIVMTQSPLSLPVSRGQSASISCRSSHSVVHSDGKTYVNWFHQRPGQAPRRLIYQVSKRDSGVPDRFSGSGSGFDFTLKISRVEAEDVGVYFCMQGTDWPRSFGGGTKVDIK

SEQ ID NO: 1889 - protein, 108 aa, Homo sapiens
DIVMTQSPSSLSASVGDRVTITCRASQSINIYLNWYQQKPGKAPKLLIYAASSLQSGVPSRFSGSGSGTDFTLTISSLQPEDFATYYCQQSYSTPLITFGQGTRLEIK

SEQ ID NO: 1890 - protein, 112 aa, Homo sapiens
DIRLTQSPLSLPVTLGQAASISCKSSHFIVHTDGNTYLNWFHQRPGQSPRRLIYKVSNRDSGVPDRFSGSGSGTDFTLEISGVEAEDVGVYYCMQGTEWPRTFGQGTKVDIK

SEQ ID NO: 1891 - protein, 112 aa, Homo sapiens
ETTLTQSPLFLPVTLGQPASISCTSSVHVVHSDGNTYLNWFQQRPGQSPRRLIYKVSNRDSGVPDRFSGSGSGTYFTLKISRVEAEDVGVYYCMQGTDWPRTFGQGTKVDIK

SEQ ID NO: 1892 - protein, 106 aa, Homo sapiens
ETTLTQSPATLSLSPGERATLSCRASQSINDYLGWYQHRPGQAPRLLIHDASTRAPGIPVRFSGSGSGTDFTLTISSLEPEDSAVYYCQQRFSWYNFGPGTKVEIK

SEQ ID NO: 1893 - protein, 111 aa, Homo sapiens
QSVLTQPASVSGSPGQSITISCAVTSSDVGSYNLVSWHQQHPGKAPKLMIYEVNKRPSGVSNRFSGSKSGNTASLTISGLQAEDEAVYYCCSYGGRSTSVVFGGGTKLTVL

SEQ ID NO: 1894 - protein, 106 aa, Homo sapiens
DIRLTQSPATLSLSPGERATLSCRASQSINDYLGWYQHRPGQAPRLLIHDASTRAPGIPVRFSGSGSGTDFTLTISSLEPEDSAVYYCQQRFSWYNFGPGTKLEIK

SEQ ID NO: 1895 - protein, 110 aa, Homo sapiens
QPVLTQPASVSGSPGQSITISCTGTTSDVGGYDYVSWYQQRPGKAPKLIIYDVINRPSGVSNRFSGSKSGNTASLTISGLQADDETDYYCSSYTSGGTLVFGTGTKLTVL

SEQ ID NO: 1896 - protein, 112 aa, Homo sapiens
DIQMTQSPLSLPVGLGQSASISCRSSQWVVHTDGNTYLNWFHQRPGQSPRRLIYKVSNRDSGVPDRFSGSGSGTDFTLRISRVEAEDVGVYYCMQATEWPRTFGQGTKVEIK

SEQ ID NO: 1897 - protein, 112 aa, Homo sapiens
DIRLTQSPLSLPVTLGQPASISCRSSQRIVHTDGNTYLNWFLQRPGQSPRRLIYKVSNRDSGVPDRFSGSGSGTDFTLKISRVEAEDVGIYYCMQGTEWPRTFGQGTKVDIK

SEQ ID NO: 1898 - protein, 112 aa, Homo sapiens
DIQLTQSPLSLPVTLGQPASISCRSSQRIVHTDGNTYLNWFLQRPGQSPRRLIYKVSNRDSGVPDRFSGSGSGTDFTLKISRVEAEDVGIYYCMQGTEWPRTFGQGTKVEIK

SEQ ID NO: 1899 - protein, 113 aa, Homo sapiens
ETTLTQSPLSLSVTLGQSASISCRASQTVVHSVDGNTYLNWFHQRPGQSPRRLIYKVSNRDSGVPDRFSGSGSGTDFTLRISRVEAEDIGIYYCMQGTDWPRTFGQGTKVEIK

SEQ ID NO: 1900 - protein, 112 aa, Homo sapiens
DIVMTQSPLSLPVTLGQPASISCRSSQRIVHTDGNTYLNWFLQRPGQSPRRLIYKVSNRDSGVPDRFSGSGSGTDFTLKISRVEAEDVGIYYCMQGTEWPRTFGQGTKVEIK

SEQ ID NO: 1901 - protein, 112 aa, Homo sapiens
DIRMTQSPLSLPVTLGQPASISCRSSQFVVHTDGNTYLNWFQQRPGQSPRRLIYKVSNRDSGVPDRFSGSGSGTDFTLKISRVEAEDVGVYYCMQATEWPRTFGQGTKVDIK

SEQ ID NO: 1902 - protein, 108 aa, Homo sapiens
SYVLTQPPSVSVSPGQTARITCSADGLPKQYSYWYQQKPGQAPVMVIYKDTERPSGIPERFSGSSSGTTATLTISGVQAEDEADYYCQSADSNDSSPVFGGGTQLTVL

SEQ ID NO: 1903 - protein, 107 aa, Homo sapiens
ETTLTQSPATLSLSPGEGATLSCRASQSVSSSLAWYQQKPGQAPRLLIYDASNRATGIPARFSGSGSGTDYTLTISSLEPEDFAVYYCHQRSNWPYTFGQGTKVEIK

SEQ ID NO: 1904 - protein, 107 aa, Homo sapiens
DIVLTQTPSSLSASVGDRVTITCRASQTIATYLSWYQQKPGKAPKLLIYAVSSLQSGVPSRFSGSGSGTDFTLTIGSLQPEDFATYYCQQSYSIPWTFGQGTKVDIK

SEQ ID NO: 1905 - protein, 108 aa, Homo sapiens
EIVMTQSPSSLSASVGDRVTITCRASQSISYYLNWYQQKPGKAPKLLIYAASSLQSGVPSRFSGSGSGTDFILTISSLQPEDIATYYCQHSYSSPPLTFGGGTKVEIK

SEQ ID NO: 1906 - protein, 112 aa, Homo sapiens
ETTLTQSPLSLPVTLGQPASISCRSSQIVVHSDGNTYLNWFHQRPGQSPRRLIYKVSNRDSGVPDRFSGSGSGTDFTLKISRVEAEDIGVYYCMQGTDWPRTFGQGTKVDIK

SEQ ID NO: 1907 - protein, 112 aa, Homo sapiens
DIRLTQSPLSLSVTLGQAASISCTCSQTAVHSDGNTYLNWFHQRPGQSPRRLIYKVSNRDSGVPDRFSGSGSGTDFTLKISRVEAEDVGIYYCMQTTDWPRTFGQGTKVEIK

SEQ ID NO: 1908 - protein, 112 aa, Homo sapiens
EIVLTQSPLSLPVTLGQPASISCRSSLRLVHTDGNTYLNWFQQRPGQSPRRLIYKVSNRDSGVPDRFSGSGSGTDFTLKISRVEAEDIGVYYCMQGTEWPRTFGQGTKVDIK

SEQ ID NO: 1909 - protein, 107 aa, Homo sapiens
DIVMTQSPGTLSLSPGERAALSCRASQIVTRSQLAWYQHKPGQPPRLLIYDSSSRATGTPDRFSGSGSGTDFTLTISRLEPEDSAVYYCHQYSGSATFGPGTKVEIK

SEQ ID NO: 1910 - protein, 110 aa, Homo sapiens
SYELTQPPSVSGAPRQKVTISCSGSSANIASNGVNWYQQLPGKAPKLLIYYDDLVSSGVSDRFSGSKSGTSASLAISGLQSEDEADYYCATWDDILNGPVFGGGTKLTVL

SEQ ID NO: 1911 - protein, 107 aa, Homo sapiens
DIRMTQSPSSLSASVGDRVTITCRASQGFGNKVAWYQQKPGTAPKLLIYETSTLQSGVPSRFSGSGSGTEFAFTISSLQPEDGATYYCQKYNRAPWTFGQGTKVEIK

SEQ ID NO: 1912 - protein, 111 aa, Homo sapiens
QSALIQPASVSGSPGQSITISCTGTSSDVGRYNYVSWYQQHPGKAPKLMIYDVSNRPSGVSNRFSGSKSGNTASLTISGLQAEDEAAYYCSSYISDIKLVVFGGGTKLTVL

SEQ ID NO: 1913 - protein, 108 aa, Homo sapiens
QSALIQPRSVSGSPGQSVTISCTGTSSDVGGSNYVSWYQQHPGKAPKLLVYDVTKRPSGVPDRFSGSKSGNTASLTISGLQAEDEADYYCCSYAGTYIFGTGTKLTVL

SEQ ID NO: 1914 - protein, 110 aa, Homo sapiens
QSVLTQPPSVSGSPGQSVSISCSGTSSDFGNYNRISWYQQTPGTAPKVIIYEVNSRPSGVPDRFSGSKSGNTASLTITGLQAEDEADYYCCSYRSDNTYIFGGGTKVTVL

SEQ ID NO: 1915 - protein, 112 aa, Homo sapiens
ETTLTQSPLFLPVTLGQPASISCRSSQRLVHTNGNTYLNWFQQRPGHSPRRLIYQVSNRDSGVPDRFSGSGSGTDFTLKISRVEAEDVGVYYCMQGTEWPRTFGGGTKLEIK

SEQ ID NO: 1916 - protein, 112 aa, Homo sapiens
QPVLTQPPSASGTPGQRVTISCSGGSSNIGSNSVNWYQQLPGTAPKLLIYSNSQRPSGVPDRFSGSKSGTSASLAISGLQSEDEADYYCAAWDDSLNTFRYVFGTGTKVTVL

SEQ ID NO: 1917 - protein, 107 aa, Homo sapiens
ETTLTQSPSSLSASVGDRVNITCRASQSISTYLTWYQQKPGKAPKLLIYGASSLHSGVPSRFTGVGSGTEFTLSISSLQPEDFATYYCQQSYNTFFTFGGGTKVDIK

SEQ ID NO: 1918 - protein, 107 aa, Homo sapiens
DIRLTQSPSSLSASVGDRVTITCRASQAIAGWLAWYQQKPGRAPKSLIYRASSLQSGVPSRFSGSGSGTDFSLTISNLQPEDSATYYCQHYDSYPTAFGQGTRLEIK

SEQ ID NO: 1919 - protein, 112 aa, Homo sapiens
ETGLTQIPFSLPVTFGQPASISCRFSQRLVHTDGNTNLNWFLQRPGQFPRGLIYKVFNRDSGVPDRFRGSGSGIDFTLKISRVEVEDVGIYYGMQGTEWLGTFGQGTKVEIK

SEQ ID NO: 1920 - protein, 112 aa, Homo sapiens
ETTLTQSPLSLAVTLGQPASISCRSSLGLVHTNGNTYLNWFQQRPGQSPRRLIYRVSNRDSGVPDRFSGSGSVTDFTLTISRVEAEDIGVYYCMQGTEWPRTFGQGTKVEIK

SEQ ID NO: 1921 - protein, 112 aa, Homo sapiens
ETTLTQSPLSLSVTLGQAASISCTCSQTAVHSDGNTYLNWFHQRPGQSPRRLIYKVSNRDSGVPDRFSGSGSGTDFTLKISRVEAEDVGIYYCMQTTDWPRTFGQGTKVDIK

SEQ ID NO: 1922 - protein, 107 aa, Homo sapiens
EIVMTQSPASLSASVGDRVTITCRAGQSISTNLCWYQQRQGKAPKLLIYAASSLRSGVPSRFSGSGSGTDFTLTISSLQPEDFATYYCQQSYSTPPTFGGGTKVDIK

SEQ ID NO: 1923 - protein, 108 aa, Homo sapiens
DIQVTQSPATLSVSPGERVTLSCRASQSISNTLAWYQQKPGQAPRLLIYGASTRATGIPARFSGSGSGTEFTLTISSLQSEDFAVYYCHQYNKWPPITFGGGTKVEIK

SEQ ID NO: 1924 - protein, 107 aa, Homo sapiens
DIQMTQSPSSLSASVGDRVTISCRASQGISTFLAWFQQRPGKAPKSLIYAASKLQSGVPSRFSGSDSGPDFTLTIDNLRPEDSATYYCKQYNSYPYTFGQGTKLEIK

SEQ ID NO: 1925 - protein, 107 aa, Homo sapiens
EIVMTQSPSSLSASVGDSVTITCRASQSISNYLNWYQDKPGKAPELLIYAASNLQSGVPSRFSGSGSGTDFTLTISSLQPEDFATYYCQQSYSDSWTFGQGTKVDIK

SEQ ID NO: 1926 - protein, 112 aa, Homo sapiens
ETTLTQSPLSLPVTLGQPASISCRSSQRIVHTDGNTYLNWFLQRPGQSPRRLIYKVSNRDSGVPDRFSGSGSGTDFTLKISRVEAEDVGIYYCMQGTEWPRTFGQGTKVEIK

SEQ ID NO: 1927 - protein, 112 aa, Homo sapiens
DIQMTQSPLSLPVTLGQPASISCRSSQSVVHSDGNTYLNWFHQRPGQSPRRLIYKVSNRDSGVPDRFSGSGSGTDFTLKISRVEAEDIGVYYCMQGTDWPRTFGQGTKVDIK

SEQ ID NO: 1928 - protein, 113 aa, Homo sapiens
GIVLTQSPDSLAVSVGERATINCKSSQTVLYSSKNKHYLAWYQQKPGQPPKLLTSSPSTREPGVPDRFSGSGSGTDFTLTISSLQAEDVAVYYCQQYYTTPYTFGQGTKVDIK

SEQ ID NO: 1929 - protein, 110 aa, Homo sapiens
EIVMTQTPSSLSASVGDRVTITCRASQSISNYVNWYQQKPGRAPNLLIYAASSLQSGVSSRFSGSGSGTDFTLTISSLQPEDFATYYCQQTYSTPPEGPTFGPGTKVEIK

SEQ ID NO: 1930 - protein, 115 aa, Homo sapiens
QPVLTQPASVSGSPGQSVTISCTGTSSDVGSYSDVGNYVSWYQHHPGKAPKLMIYEVRTRPSWVSTRFSGSKSGTTASLTISGLQAEDEADYYCCSYAGASPFVVFGGGTKLTVL

SEQ ID NO: 1931 - protein, 107 aa, Homo sapiens
EIVMTQSPGTLSSSPGERATLSCRASQSVSSRYLAWYQQKPGQAPRLLIYGTSNRATGIPDRFSGSGSGTDFTLTISRLEPEDFAVYYCQQYGSSYTFGPGTKLEIK

SEQ ID NO: 1932 - protein, 112 aa, Homo sapiens
DIVMTQSPLSLPVGLGQSASISCRSSQRVVHTDGNTYLNWFHQRPGQSPRRLIYKVSNRDSGVPDRFSGSGSGTDFTLRISRVEAEDVGVYYCMQATEWPRTFGQGTKVEIK

SEQ ID NO: 1933 - protein, 112 aa, Homo sapiens
DIRLTQSPLSLSVTLGQAASISCTCSQSAVHSDGTTYFNWFHQRPGQSPRRLIYKVSNRDSGVPDRFIGSGSGTHFTLKISRVEAEDVGVYYCMQTTDWPRTFGQGTKVEIK

SEQ ID NO: 1934 - protein, 112 aa, Homo sapiens
ETTLTQSPLSLPVTLGQPASISCRSSQSVVHSDGNTYLNWFHQRPGQSPRRLIYKVSNRDSGVPDRFSGSGSGTDFTLKISRVEAEDIGVYYCMQGTDWPRTFGQGTKVEIK

SEQ ID NO: 1935 - protein, 112 aa, Homo sapiens
ETTLTQSPLSLPVTLGQPASISCTSSQTVVHTDRNTYLNWYHQRPGQSPRRLIYKVSNRDSGVPDRFSGSGSGSHFTLKISRVEAEDVGVYYCMQGTEWPRTFGQGTKLEIK

SEQ ID NO: 1936 - protein, 110 aa, Homo sapiens
QPGLTQPASVSGSPGQSITISCTGTSGDVGSDNLVSWYQRHPGKAPKLMIYEGSKRPSGVSHRFSGSNSGNTASLTISGLQAEDDADYYCCSYAGDDTVVFGGGTKLTVL

SEQ ID NO: 1937 - protein, 108 aa, Homo sapiens
DIVLTQSPGTLSLSPGERVTLSCRASQSISSNYLAWYQQKPGQAPRLLISDASSRATGIPDRFSGSGSGADFTLIISRLEPEDFAVYFCHQYGGSPTTFGQGTKVEIK

SEQ ID NO: 1938 - protein, 112 aa, Homo sapiens
ETTLTQSPLSLPVTLGQPASISCRSSQIAMHSDGNTYLSWFHQRPGQPPRRLIYKISNRDSGVPDRFSGSGSGTDFTLKISRVEAEDIGTFYCMQGTDWPRTFGQGTKVEIK

SEQ ID NO: 1939 - protein, 106 aa, Homo sapiens
ETTLTQSPATLSLSPGERATLSCRASQSVSSYLAWYQQKPGQAPRLLIYDAFNRATGVPARFSGSGSGTDFTLTISSLEPEDFAVYYCQQRTSTLTFGGGTKVDIK

SEQ ID NO: 1940 - protein, 112 aa, Homo sapiens
ETTLTQSPLSLPVTLGQAASISCRSSQAVVHSDGNTYLNWFQQRPGQPPRRLIYKVSNRDSGVPDRFSGSGSGTVFTLKISRVEAEDIGVYYCMQGTEWPRTFGQGTKVEIK

SEQ ID NO: 1941 - protein, 110 aa, Homo sapiens
QSVLTQPPSVSAAPGQKVTISCSGSSSNLGNNYVSWYQQLPGTAPKLLIYDNHKRPSGIPDRFSGSKSGTSATLGITGLQTGDEADYYCETWDSSLSVVVFGGGTKVTVL

SEQ ID NO: 1942 - protein, 110 aa, Homo sapiens
QSVLTQPPSVSATPGQKVTISCSGSSSNIGNNYVSWYQQLPGTAPKLLIYDNNKRPSGIPDRFSGSKSGTSATLGITGLQTGDEADYYCGTWDSRLSAVVFGGGTKLTVL

SEQ ID NO: 1943 - protein, 107 aa, Homo sapiens
DIRVTQSPATLSLSPGERATLSCRASENIAHYLAWYQQKPGQAPRLVIYDASSRATGIPGRFSGSGAGTDFTLTINSLEPEDFAVYYCQQRSNWPQNFGGGTKVDIK

SEQ ID NO: 1944 - protein, 107 aa, Homo sapiens
DIRLTQSPSSLSASVGDRVTITCRASQDISSWLAWYQQKSGKAPKSLIYAASSLQNGVPSRFSGSRSGTDFTLTISSLQPEDLGTYYCQQYDSYPVTFGQGTRLEIK

SEQ ID NO: 1945 - protein, 112 aa, Homo sapiens
DIVLTQTPDSLAVSLGERATINCKSSQSVLYSSNNKNYLAWYQQKPGQPPKLLIYWASTRESGVPDRFSGSGSGTDFTLTISSLQAEDVAVYYCQQYYTMWTFGQGTKVEIK

SEQ ID NO: 1946 - protein, 112 aa, Homo sapiens
QSVLTQPPSVSAAPGQKVTISCSGSSSNIGNDYVSWYQQLPGTAPKLLIYENYKRPSGIPDRFSGSKSGTSATLDITGLQTGDEADYYCGTWDSSLSVDNYVFGTGTKLTVL

SEQ ID NO: 1947 - protein, 112 aa, Homo sapiens
DIVLTQSPLSLPVTLGQPASISCRSSQSVVHSDGNTYLNWFHQRPGQSPRRLIYKVSNRDSGVPDRFSGSGSGTDFTLKISRVEAEDIGVYYCMQGTDWPRTFGQGTKVDIK

SEQ ID NO: 1948 - protein, 112 aa, Homo sapiens
ETTLTQSPLSLPVTLGQPASISCRSSQVLVHSDGNTYLNWFQQRPGQSPRRLIYKVSNRDSGVPDRFSGSGSGIDFTLKISRVEAEDIGVYYCMQGTEWPRTFGQGTKVDIK

SEQ ID NO: 1949 - protein, 107 aa, Homo sapiens
DIQLTQSPSSLSASVGDRVTITCRASQSISHYLNWYQQKPGKAPKLLIYAASNLQSGVPSRFSGNGSGTDFTLTISSLQPEDFATYFCQQSYSTPLTFGGGTKVDIK

SEQ ID NO: 1950 - protein, 107 aa, Homo sapiens
EIVLTQSPATLSLSPGERATLSCRASENIAHYLAWYQQKPGQAPRLVIYDASSRATGIPGRFSGSGAGTDFTLTINSLEPEDFAVYYCQQRSNWPQNFGGGTKVEIK

SEQ ID NO: 1951 - protein, 110 aa, Homo sapiens
QSVLTQPPSVSGAPGQRVTISCTGSSSNIGAGYYVHWYQQLPGTAPKLLIYDNNNRPSGVPDRFSGSRSGTSASLAITGLQAEDEGDYFCQSYDSSLSASFGGGTKVTVL

SEQ ID NO: 1952 - protein, 111 aa, Homo sapiens
QSVLTQPPSVSGAPGQRVTISCTGSNSNIGAGYDVHWYQQLPETAPKLLIYANGNRPSGVPDRFSGSKSGTSASLAITGLQAEDEADYYCQSYDSSLSGVLFGGGTKLTVL

SEQ ID NO: 1953 - protein, 112 aa, Homo sapiens
DIQLTQSPLSLPVTLGQPASISCRSSQHLVHSDGNTYLNWFQQRPGQSPRRLIYKVSNRDSGVPDRFSGSGSGIDFTLKISRVEAEDIGVYYCMQGTEWPRTFGQGTKVEIK

SEQ ID NO: 1954 - protein, 108 aa, Homo sapiens
DIQVTQSPATVSVSPGEGASLSCRASQSVRSNLAWFQQKPGQAPRLLISDASTRASGVPARFTGSGFGTEFTLTISSLQSEDFAIYYCQQYNTWPPLTFGGGTKVEIK

SEQ ID NO: 1955 - protein, 112 aa, Homo sapiens
DIRLTQSPLSLPVTLGQPASISCRSSQSLVHSNGNTYLNWFQQRPGQSPRRLIYEVSNRDSGVPDRFTGSGSGTDFTLKISRVEAEDVGVYYCMQGTHWPRSFGGGTKVEIK

SEQ ID NO: 1956 - protein, 109 aa, Homo sapiens
ETTLTQSPGTLSLSPGERATLSCRASQSIGSSYLAWYQQKPGQAPRLLIYGASSRATGIPDRFSGSGSGTDFTLTISRLEPEDFAVYYCQQYGSAPLYTFGQGTKVEIK

SEQ ID NO: 1957 - protein, 108 aa, Homo sapiens
EIVLTQSPGTLSLSPGERASLSCRASQSVSSSYLAWYQHRPGQAPRLLIYDASSRATGIPDRFSGSGSGTDFTLTISRLESEDFAVYYCQQYGNSPRTFGQGTKVDIK

SEQ ID NO: 1958 - protein, 110 aa, Homo sapiens
QPVLTQPPSVSAAPGQKVTISCSGSSSNIGDNYVSWYQQLPGTAPKLLIYDNNKRPSGIPDRFSGSKSGTSATLGITGLQTGDEADYYCETWDTSLSVVVFGGGTKLTVL

SEQ ID NO: 1959 - protein, 112 aa, Homo sapiens
DIVMTQTPLSLAVTLGQPASISCRSSHGLVHTNGNTYLNWFHQRPGQPPRRLIYKISNRDSGVPDRFSGSGSGTDFTLKISRVEADDVGVYYCMQGTDWPRTFGQGTKVEIK

SEQ ID NO: 1960 - protein, 107 aa, Homo sapiens
EIVLTQSPGTLSLSPGERATLSCRASQTVTRSQLAWYQHKPGQPPRLLIYDSSKRATGSPDRFSASGSGTDFTLTISGLEPEDTGIYYCLQYSDATTFGPGTKLEIK

SEQ ID NO: 1961 - protein, 107 aa, Homo sapiens
EIVMTQSPSSLSASIGDRVTISCRASQNIGSYLNWYQQRPGKAPNLLIFVASSLQSGVPSRFSGSGSGTDFTLTISSLQAEDFATYYCQQSYTTPITFGQGTRLEIK

SEQ ID NO: 1962 - protein, 112 aa, Homo sapiens; identical to SEQ ID NO: 1932

SEQ ID NO: 1963 - protein, 109 aa, Homo sapiens
EIVLTQSPATLSLSPGERATLSCRASQSVSNFLAWYQQKPGQPPRLLIYDASNRASGIAARFSGRGSGTDFTLTISSLEPEDFAVYYCQQRRNWPPMYTFGQGTKLEIK

SEQ ID NO: 1964 - protein, 112 aa, Homo sapiens
EIVLTQSPLSLSVTLGQAASISCTCSQTAVHSDGNTYLNWFHQRPGQSPRRLIYKVSNRDSGVPDRFSGSGSGTDFTLKISRVEAEDVGIYYCMQTTDWPRTFGQGTKLEIK

SEQ ID NO: 1965 - protein, 112 aa, Homo sapiens
ETTLTQSPLSLSVTLGQAASISCTCSQSAVHSDGNTYFNWFHQRPGQSPRRLIYKVSNRDSGVPERFSGSGSGTHFTLIISRVEAEDVGVYYCMQTTDWPRTFGQGTKVDIK

SEQ ID NO: 1966 - protein, 111 aa, Homo sapiens
NFMLTQPHSVSESPGKAVIISCTRSSGNIASNFVQWYQQRPGSSPTPVIYEDKLRPSGVPDRFSGSIDRSSNSASLTISGLKTEDEADYYCQSYDSGNLVVFGGGTKLTVL

SEQ ID NO: 1967 - protein, 112 aa, Homo sapiens
DIQMTQSPLSLPVTLGQAASISCRSSQPIPHTDGNTYLNWFHQRPGQSPRRLIHKVSNRDSGVPDRFSGSGSGLDFTLEISGVEAEDVGIYYCMQGTEWPRTFGQGTKVEIK

SEQ ID NO: 1968 - protein, 112 aa, Homo sapiens
EIVMTQTPLSLPVTLGQPASISCRSSHGLVHTNGNTYLNWFHQRPGQPPRRLIYQVSHRDSGVPDRFSGSGSGTDFTLKISRVEADDVGVYYCMQGTDWPRTFGQGTKVDIK

SEQ ID NO: 1969 - protein, 109 aa, Homo sapiens
ETTLTQSPGTLSLSPGERATLSCRASQSVGNNYLAWYQQKPGQAPRLLIYGASSRATGIPDRFSGSGSGTDFTLTISRLEPEDFAVYYCQQYGTSPVYTFGQGTKVEIK

SEQ ID NO: 1970 - protein, 112 aa, Homo sapiens
DIQLTQSPLSLPVTLGQPASISCTSSQNVVHTDGNTYLNWFHQRPGQSPRRLIYKVSNRDSGVPDRFSGSGSGSHFTLKISRVEAEDVGIYYCMQGTDWPRTFGQGTKVEIK

SEQ ID NO: 1971 - protein, 109 aa, Homo sapiens
DIVLTQTPATLSLSPGERATLSCRASQSVSNFLAWYQQKPGQPPRLLIYDASNRASGIAARFSGRGSGTDFTLTISSLEPEDFAVYYCQQRRNWPPMYTFGQGTKVEIK

SEQ ID NO: 1972 - protein, 112 aa, Homo sapiens
QSVLTQPPSVSGAPGQRVTISCTGSSSNIGAGYDVHWYQQVPGTAPKLLIYGNSNRPSGVPDRFSGSKSGTSASLAITGLQAEDEADYYCQSYDSSLSVLYVFGTGTKVTVL

SEQ ID NO: 1973 - protein, 107 aa, Homo sapiens
DIRLTQSPATLSLSPGERATLSCRASQSIGYYLAWFQQKPGQAPRLLIYDASKRATGIPARFSGSGSGTDFTLTISSLEPEDFAVYYCQHRTNWPYTFGQGTKVEIK

SEQ ID NO: 1974 - protein, 110 aa, Homo sapiens
QPGLTQEPSLTVSPGGTVTLTCGSSAGAVTSGHYPYWFQQKPGQAPRTLIYDTNNKYSWTPARFSGSLLGGKAALTLSGAQPEDEAEYFCFLSYRGAPPVFGGGTHLTVL

SEQ ID NO: 1975 - protein, 107 aa, Homo sapiens
DIRMTQSPFSLSASVGDRVTITCRASQGFGNRLAWYQQKPGRAPKLLIYDASTLQSGVPSRFSGSGSETDFALTISSLQPEDVATYYCQKHDRDPWTFGQGTKVEIK

SEQ ID NO: 1976 - protein, 112 aa, Homo sapiens
DIVMTQSPLSLPVTLGQPASISCRSSQRLVHSDGNTYLNWFQQRPGQSPRRLIYKVSNRDSGVPDRFSGSGSGTDFTLKISRVEAEDIGVYYCMQGTEWPRTFGQGTKVEIK

SEQ ID NO: 1977 - protein, 107 aa, Homo sapiens
ETTLTQSPASVSASVGDRVTISCRASQGIGRWLAWYQQKPGRAPKLLIFSASSLQSGVPSRFSGSGSGTDFTLTISSLQPEDFATYYCQQAESFPFTFGGGTKVEIK

SEQ ID NO: 1978 - protein, 112 aa, Homo sapiens
ETTLTQSPLSLPVDLGQSASISCRSSQRVVHTNGNTYLHWFHQRPGQAPRRLIYKVSNRESGVPDRFSGSGSGTDFTLRISRVEAEDVGVYYCMQATDWPRTFGQGTKVEIK

SEQ ID NO: 1979 - protein, 106 aa, Homo sapiens
CIRLTQSPATLSLSPGERATLSCRASQSVTSYLAWYQQRPGQAPRLLIYDTSNRVTGVPVRFSGSGYGTDFTLTISSLEPEDFAVYYCQQRGNGYTFGPGTKVEIK

SEQ ID NO: 1980 - protein, 112 aa, Homo sapiens
ETTLTQSPLSLPVGLGQSASISCRSSQRVVHTDGNTYLNWFHQRPGQSPRRLIYKVSNRDSGVPDRFSGSGSGTDFTLRISRVEAEDVGVYYCMQATEWPRTFGQGTKVDIK

SEQ ID NO: 1981 - protein, 112 aa, Homo sapiens
EIVMTQSPLSLPVTLGQPASISCRSSQSVVHSDGNTYLNWFHQRPGQSPRRLIYKVSNRDSGVPDRFSGSGSGTDFTLKISRVEAEDIGVYYCMQGTDWPRTFGQGTKLEIK

SEQ ID NO: 1982 - protein, 112 aa, Homo sapiens
DIVMTQSPLSLPVDLGQSASISCRSSQTAVHTNGNTYLHWFHQRPGQAPRRLIYKVSNRESGVPDRFSGSGSGTDFTLRINRVEAEDVGVYYCMQATDWPRTFGQGTKLEIK

SEQ ID NO: 1983 - protein, 107 aa, Homo sapiens
DIVLTQTPSSLSASVGDRVTITCRASQTISYYLNWYQQKVGKAPQLLVYAASSLQSGVPSRFSGSGSGTDFTLTISSLQPEDFATYYCQQSYSVPLTLGQGTKVDIK

SEQ ID NO: 1984 - protein, 112 aa, Homo sapiens
DIQMTQSPLSLPVDLGQSASISCRSSQRVVHTNGNTYLHWFHQRPGQAPRRLIYKVSNRESGVPDRFSGSGSGTDFTLRISRVEAEDVGVYYCMQATDWPRTFGQGTKVEIK

SEQ ID NO: 1985 - protein, 113 aa, Homo sapiens
QPGLTQPASVSGSPGQSITISCTRTSGDVGDYNSVSWYVSWYQQHPGRAPKLMLYDVSNRPSGVSNRFSGSKLGDTASLTISELQAEDEADYYCSTYTSTSTIFGGGTKLTVL

SEQ ID NO: 1986 - protein, 112 aa, Homo sapiens
DIQMTQSPLSLPVTLGQPASISCRASQTVVHTNGNTYLNWFHQRPGQSPRRLIYEVSNRDSGVPDRFSGSGSGTDFTLSISRVEAEDIGVYYCMQGTDWPRTFGPGTKVEIK

SEQ ID NO: 1987 - protein, 112 aa, Homo sapiens
DIRLTQSPLSLPVDLGQSASISCRSSQTVVHTNGNTYLHWFHQRPGQAPRRLIYKVSNRESGVPDRFSGSGSGTDFTLRISRVEAEDVGVYYCMQATDWPRTFGQGTKVDIK

SEQ ID NO: 1988 - protein, 107 aa, Homo sapiens
DIRVTQSPSSLSATVGDRVTITCRASQTITKYLNWYQQKPGKAPKLLLYGASSLQSGVPSRFSGSGSGTDFTLTISSLQPEDFATYYCQQTYITPGTFGQGTRLEIK

SEQ ID NO: 1989 - protein, 113 aa, Homo sapiens
DIRLTQSPDSLALSLGERATINCKSSQSVLFSSNNNNYLGWYQQKPGQPPKLLIYWASTRESGVPDRFSGSGSGTDFTLTISSLQAEDVAVYYCQQYYLTPWTFGQGTKVDIK

SEQ ID NO: 1990 - protein, 110 aa, Homo sapiens
QPVLTQPASVSGSPGQSITISCTGTSSDVGNYNVVSWYQQHPGKAPQLFIYEDTKRPSGVSDRFSGSKSGITASLTISRLQPEDEADYYCCSYAVSGTVLFGGGTKVTVL

SEQ ID NO: 1991 - protein, 107 aa, Homo sapiens
EIVLTQSPGTLSVSPGERATLSCRASQIINRSQLGWYQHKPGQAPRLLIFDSSKRATGTPDRFSASGSETDFTLTISGVEPEDSGVYYCLQYSLATTFGPGTKVDIK

SEQ ID NO: 1992 - protein, 106 aa, Homo sapiens
DIQLTQSPATLSLSPGERATLSCRASPSVFTFLAWYQQRPGQPPRLLIHDVSNRAPGIPARFSGSGSGTDFTLIISSLEPDDSAVYFCQQRSDGYNFGPGTKVDIK

SEQ ID NO: 1993 - protein, 108 aa, Homo sapiens
DIRVTQSPSSLSASVGDRVTITCRASQTINNYLNWYQQKPGKAPNLLIYAASTLQNGVPSRFSGSGSGTDFTLTISSVQPEDFATYYCQQTYITPTWTFGQGTKVEIK

SEQ ID NO: 1994 - protein, 107 aa, Homo sapiens
EIVMTQSPSSLSASVGDRVTITCRASQSISNYLYWYQQKPGKAPKLLIYVASNLQSGVPSRFSGSGSGTDFTLTISSLQPEDFATYYCQQSYSTPYNFGQGTKVDIK

SEQ ID NO: 1995 - protein, 106 aa, Homo sapiens
EIVLTQSPSTLSASVGDRVTITCRASQNVNNWLAWYQQKPGKAPKLLIYEASTLKSGVPSRFSGSGSGTEFTLTISSLQPDDFATYYCQQYNSQYTFGQGTKVDIK

SEQ ID NO: 1996 - protein, 110 aa, Homo sapiens
QPVLTQPRSVSGSPGQSVTISCTGSSSTFGTDNHISWYQQLPGKVPKLIIHAVSQRPSVVPDRFSGSRSGNTASLTISGLQAEDEADYYCCSSPGTITWVFGGGTKVTVL

SEQ ID NO: 1997 - protein, 110 aa, Homo sapiens
QSVLTQPPSVSGVPRQKVTISCSGSTANIASNGVNWYQLVPGKAPRLLISYDDLVPSGVSARFSGSKSGTSASLAISGLQAEDEADYYCATWDDILNGPVFGGGTKLTVL

SEQ ID NO: 1998 - protein, 112 aa, Homo sapiens
DIVLTQSPLSLPVTLGQSASISCRSSQGLVHSDGNIYLNWFQQRPGQSPRRLIYKVSNRDSGVPDRFSGSGSGTDFTLKISRVEAEDVGLYYCMQATHWPRAFGQGTKLEIK

SEQ ID NO: 1999 - protein, 108 aa, Homo sapiens
EIVMTQSPGTLSLSPGERVTLSCRATQSVSNNHLAWYQQKPGQAPRLLIYGASTTATDIPDRFSGRVAGTDFTLTISRLDPEDFAVYYCHQYGSSPWTFGQGTKVEIK

SEQ ID NO: 2000 - protein, 109 aa, Homo sapiens
DIRLTQSPATLSLSPGERATLSCRASQSVSSSLAWYQQKPGQAPRLLIYEASNRATGVPARFSGSGSGTDFTLAISSLEPEDFAVYYCQHRSNWPPRYTFGQGTKVEIK

SEQ ID NO: 2001 - protein, 108 aa, Homo sapiens
SYELTQPPSVSVSPGQTARITCSGDALPRRYAYWYQQRSGQAPVLVIYEDNKRPSGIPERFSAFSSGTRATLTISGAQVEDEADYYCYSTDSTANYKVFGGGTKVTVL

SEQ ID NO: 2002 - protein, 108 aa, Homo sapiens
SYELTQPPSVSVSPGQTARITCSGDALPRRYAYWYQQRSGQAPVLVIYEDNKRPSGIPERFSAFSSGTRATLTISGAQVEDEADYYCYSTDSTANYKVFGGGTKLTVL

SEQ ID NO: 2003 - protein, 108 aa, Homo sapiens; identical to SEQ ID NO: 2002

SEQ ID NO: 2004 - protein, 115 aa, Homo sapiens
QSVLTQPSSLSASPGASASLTCTLHSGFNVGDHTINWYQQRPGSPPRYLLKYKSDSDKEQGSGVPIRFSGSKDASANAGFLLISGLRSEDEADYYCMIWHDNAVVFGGGTKLTVL

SEQ ID NO: 2005 - protein, 108 aa, Homo sapiens
EIVLTQSPATLSVSPGDGASLSCRASQSVGSNLAWYQQKPGQAPRLLISDASARATGVPARFTGSGSGTDFTLTISSLQSEDFAVYYCHQYNTWPPLTFGGGTKLEIK

SEQ ID NO: 2006 - protein, 112 aa, Homo sapiens
EIVMTQSPLSLPVTLGQSASISCRSSQGLVHSDGNIYLNWFQQRPGQSPRRLIYKVSNRDSGVPDRFSGSGSGTDFTLKISRVEAEDVGLYYCMQATHWPRAFGQGTKVDIK

SEQ ID NO: 2007 - protein, 112 aa, Homo sapiens
DIVMTQSPLALSVTPGQPASISCKSSQSLLHSDGKTYFYWYLQKPGQSPHLLIYEVSNRFSGVPDRFSGSGSGTDFTLKISRVEAEDVGVYYCMQSIQVPITFGGGTKLEIK

SEQ ID NO: 2008 - protein, 107 aa, Homo sapiens
DIVMTQSPATLSVSPGERATLSCRASQSVSSNLAWYQQKPGQAPRLLIYGASTRATNIPARFSGSGSGTEFTLTISSLQSEDFAVYYCQQYNLWPYTFGQGTKVDIK

SEQ ID NO: 2009 - protein, 107 aa, Homo sapiens
EIVLTQSPSSLSASVGDRVTISCRASQGISTFLAWFQQRPGKAPKSLIYAASKLQSGVPSRFSGSDSGPDFTLTIDNLQPEDSATYYCKQYNSYPYTFGQGTKLEIK

SEQ ID NO: 2010 - protein, 110 aa, Homo sapiens
QSVVTQPPSVSAAPGQKVTISCSGSSSNIGNNYVSWYQQLPGTAPKLLIYDSDKRPSGIPERFSGSKSATSATLGITGLQTGDEADYYCETWDDSLSAVVFGGGTKLTVL

SEQ ID NO: 2011 - protein, 112 aa, Homo sapiens
DIVLTQSPLSLSVTPGQPASISCRSSQSLQHTDGKTYLYWYLQKPGQSPQLLIYELFNRFSGVPERFSGSGSGTDFTLKISRVEAEDVGIYYCMQSIQTPITFGQGTRLEIK

SEQ ID NO: 2012 - protein, 113 aa, Homo sapiens
DIRVTQSPDSLAVSLGERATINCKSSQSVLYSSNNKNYLAWYQQKIGQPPKLLIYWASIRESGVPDRFTGSGSGTDFTLTISSLQAEDVAVYYCQQYYSTPPTFGGGTKLEIK

SEQ ID NO: 2013 - protein, 112 aa, Homo sapiens
EIVMTQTPLSLPVTLGQPASISCRSSQFVSHTDGNTYLNWFQQRPGQSPRRLIYKVSKRDSGVPDRFSGSGSGTDFTLTISRVEAEDVGVYYCMQATEWPRTFGQGTKVEYQ

SEQ ID NO: 2014 - protein, 114 aa, Homo sapiens
DIVMTQSPDSLAVSLGERATINCKSSQSVLFSSNNKNYLAWYQQKPGLPPKLLIYWASTRKSGVSDRFSGSGSGTDFTLTISSLQAEDVAVYYCQQYYTTPLFTFGPGTKVDIK

SEQ ID NO: 2015 - protein, 112 aa, Homo sapiens
DIVMTQSPLSLPVTLGQPASISCRSSHSLVHTNGNTYLNWFQQRPGQPPRRLIYQVSNRDSGVPDRFSGSGSGTDFTLKISRVEADDVGIYYCMQGTDWPRTFGQGTKVDIK

SEQ ID NO: 2016 - protein, 112 aa, Homo sapiens
ETTLTQSPLSLPVTLGQPASISCRSSQGLAHSNGNTYLNWFHQRPGQSPRRLIYQVSNRDSGVPDRFSGSGSGTDFTLKISRVEAEDVGVYYCMQGTEWPRTFGQGTKVEIK

SEQ ID NO: 2017 - protein, 112 aa, Homo sapiens
DIVMTQSPLSLPVSLGQPASISCRSSQSVVHTDGNTYLNWYQQRPGQSPRRLIYKVSNRDSGVPDRFSGSGSVTDFTLKISRVEAEDVAVYYCMQGTEWPRTFGQGTKVDIK

SEQ ID NO: 2018 - protein, 113 aa, Homo sapiens
DIQMTQSPLSLSVTLGQSASISCRASQTVVHSVDGNTYLNWFHQRPGQSPRRLIYKVSNRDSGVPDRFSGSGSGTDFTLRISRVEAEDIGIYYCMQGTDWPRTFGQGTKVEIK

SEQ ID NO: 2019 - protein, 111 aa, Homo sapiens
QPVLTQPASVSGSPGQSITISCTGTSSDVGSFNYVSWYQQHPGKAPKLVIYDVYNRPSGVSNRFSGSKSGNTASLTISGLQAEDEADYYCSSYTSSSTLYVFGTGTKVTVL

SEQ ID NO: 2020 - protein, 106 aa, Homo sapiens
DIRLTQSPSTLSASVGDRVTITCRASQSISSWLAWYQQKPGKAPNLLIYKASTLESGVPSRFSGSGSGTEFTLTISSLQPDDFATYYCQQYNSGWTFGQGTKVEIK

SEQ ID NO: 2021 - protein, 112 aa, Homo sapiens
DIRLTQSPLSLPVTLGQPASISCTSSQDVVHTDGNTYLNWFHQRPGQSPRRLIYKVSNRDSGVPDRFSGSGSGSHFTLKISRVEAEDAGIYYCMQGTDWPRTFGQGTKVDIK

SEQ ID NO: 2022 - protein, 106 aa, Homo sapiens
EIVLTQSPSSLSASVGDRVTITCRASQDISNYLAWYQQKPGKAPKLLIYAASTLQSGVPLRFSGSGSGTDFTLTISSLQPEDFATYYCLQLHNYSSFGGGTKVDIK

SEQ ID NO: 2023 - protein, 106 aa, Homo sapiens
EIVLTQSPATLSLSPGERATLSCRASQSVSTFLGWYQQRPGQPPRLLIYDASYRAPDIPVRFSGSGSGTDFTLTINSLEPEDSAVYYCQQRSDGYNFGPGTKLEIK

SEQ ID NO: 2024 - protein, 109 aa, Homo sapiens
QSVLTQPASVSGSPGQSITISCTGTSSDVGAYNYVSWYQQHPGKAPKLTVYDVRNRPSGVSNRFSGSKSGNTASLTISGLQAEDEAHYYCSSYTSTNTVFGGGTKLTVL

SEQ ID NO: 2025 - protein, 112 aa, Homo sapiens
DIRLTQTPLSLPVTLGQPASISCRSSQIAMHSDGNTYLSWFHQRPGQPPRRLIYKISNRDSGVPDRFSGSGSGTDFTLKISRVEAEDIGTFYCMQGTDWPRTFGQGTKVDIK

SEQ ID NO: 2026 - protein, 110 aa, Homo sapiens
QSALIQPRSVSGSPGQSVTISCTGSSSTFGTDNHISWYQQLPGKVPKLIIHAVSQRPSVVPDRFSGSRSGNTASLTISGLQAEDEADYYCCSSPGTITWVFGGGTKVTVL

SEQ ID NO: 2027 - protein, 107 aa, Homo sapiens
DIRLTQSPSSLSASVGDRVTIACRASQSVSNYLNWYQQKPGKAPKLLIYAASSLQNGVPSRFGGSGSGTDFTLTISSLQPEDFATYYCQQCYSYPPTFGHGTKVEIK

SEQ ID NO: 2028 - protein, 113 aa, Homo sapiens
DIRMTQSPDSLAVSLGERATINCRTSQSVLYSSNNKNYLGWYQQKPGQPPKLLIYWASTRESGVPDRFSGSGSGTDFTLTISSLQAEDVAVYYCQQYYSTPYTFGQGTKVDIK

SEQ ID NO: 2029 - protein, 111 aa, Homo sapiens
QSALTQPASVSGSPGQSITISCTGTNSDISNSYSVSWYQQYPGKAPKLVIFDVINRPSGVSNRFSGSKSGNTASLTISGLQADDEADYYCCSYTRTNTPVLFGGGTKLTVL

SEQ ID NO: 2030 - protein, 108 aa, Homo sapiens
DIQLTQSPATLSVSPGERATLSCRASQSVTKHLAWYQQKPGQAPRLLIYGASTRATGVPARFSGSGSDTEFSLTISSLQSEDFAVYYCQQYYSWPPLTFGGGTKLEIK

SEQ ID NO: 2031 - protein, 112 aa, Homo sapiens
DIVMTQTPLSLPVTLGQPASISCRASQTVVHTNGNTYLNWFHQRPGQSPRRLIYEVSNRDSGVPDRFSGSGSGTDFTLSISRVEAEDIGVYYCMQGTDWPRTFGPGTKVEIK

SEQ ID NO: 2032 - protein, 112 aa, Homo sapiens
DIQLTQSPLSLPVGLGQSASISCRSSQRVVHTDGNTYLNWYHQRPGQSPRRLIYKVSNRDSGVPDRFSGSGSGTDFTLRISRVEAEDVGVYYCMQSTDWPRTFGQGTKLEIK

SEQ ID NO: 2033 - protein, 112 aa, Homo sapiens
DIVLTQSPLSLPVGLGQSASISCRSSQRVVHTDGNTYLHWFHQRPGQSPRRLIYKVSNRDSGVPDRFSGSGSGTDFTLRISRVEAEDVGVYYCMQGTEWPRTFGQGTKLEIK

SEQ ID NO: 2034 - protein, 108 aa, Homo sapiens
ETTLTQSPVTLSVSPGERATLSCRASQSVISNLAWYQQKPGQAPRLLIFGASTRATGVPARFSGSGSGTEFTLTISSLQSEDFAVYYCQQYNNWPSLTFGGGTKLEIK

SEQ ID NO: 2035 - protein, 112 aa, Homo sapiens
DIQVTQSPLSLPVGLGQSASISCRSSQRVVHTDGNTYLNWFHQRPGQSPRRLIYKVSNRDSGVPDRFSGSGSGTDFTLRISRVEAEDVGVYYCMQATEWPRTFGQGTKVDIK

SEQ ID NO: 2036 - protein, 106 aa, Homo sapiens
EIVMTQSPATLSLSPGERATLSCRASQSVSTFLGWYQQRPGQPPRLLIYDASYRAPDIPVRFSGSGSGTDFTLTINSLEPEDSAVYYCQQRSDGYNFGPGTKLEIK

SEQ ID NO: 2037 - protein, 108 aa, Homo sapiens
QPVLTQPPSVSVSPGQTARITCSGDALPRRYAYWYQQRSGQAPVLVIYEDNKRPSGIPERFSAFSSGTRATLTISGAQVEDQADYYCYSTDSTANYKVFGGGTKLTVL

SEQ ID NO: 2038 - protein, 113 aa, Mus musculus
DIVMSQSPSSLAVSVGEKITMSCKSSQSLLYTSDQKNYLAWFQQKPGQSPKLLIFWASTRDSGVPDRFTGSGSGTDFTLTISSVKAEDLAVYYCQQFYNYPRTFGGGTKLEIK

SEQ ID NO: 2039 - protein, 107 aa, Mus musculus
IVMTQTPKFLLVSAGDRVTITCKASQSVSNDVAWFQQKPGQSPKKLLIYFASNRYTGVPDRFTGSGYGTDFTFTITTVQAEDLAVYFCQQDYSSPWTFGGGTKLEIK

SEQ ID NO: 2040 - protein, 106 aa, Mus musculus
IVMTQTPKFLLVSAGDRVTITCKASQSVSNDVAWFQQKPGQSPKLLIYFASNRYTGVPDRFTGSGYGTDFTFTITTVQAEDLAVYFCQQDYSSPWTFGGGTKLEIK

SEQ ID NO: 2041 - protein, 113 aa, Mus musculus
DIVMTQAAPSEPVTPGESVSISCGSSKSLLHSNDNTYLYWFLQRPGQSPQLLIYRMSNLASGVPDRFTGSGSGTAFTLRISRVEAEDVGVYYCMQHLENPLGVRWRHQAGNQT

SEQ ID NO: 2042 - protein, 108 aa, Mus musculus
QIVLTQSPAIMSASLGERVTMTCTASSSVSSSYLHWYQQKPGSSPKLWIYSTSNLASGVPARFSGSGSGTSYSLTISSMEAEDAATYYCLQYHRSPWTFGGGTKLEIK

SEQ ID NO: 2043 - protein, 109 aa, Homo sapiens
QAVVTQEPSLTVSPGGTVTLTCGSSTGPVTSDHYPYWFQQKPGQAPTTLIYDTNNKHSWTPARFSGSLLGGKAALTLSGAQPEDEAEYYCLLSYTGARVFGGGTKLTVL

SEQ ID NO: 2044 - protein, 107 aa, Homo sapiens
DIQMTQSPSSVSASVGDRVTITCRASQGISSWLAWYQQKPGKAPKLLIYAASSLQSGVPSRFSGSGSGTDFTLTISSLQPEDFATYYCQQANSFPGTFGQGTKVEIK

SEQ ID NO: 2045 - protein, 107 aa, Homo sapiens; identical to SEQ ID NO: 2044

SEQ ID NO: 2046 - protein, 107 aa, Homo sapiens
DIQMTQSPSSLSASVGDRVTITCRASQNISSYLNWYQQKPGKAPNLLIYAASSLQSGVPPRFSGSGSGTDFTLTISSLQPEDFATYYCQQSYSTLYSFGQGTKLEIK

SEQ ID NO: 2047 - protein, 107 aa, Homo sapiens
DIQMTQSPSSLSASVGDRVTITCRASQGIRNDLGWYEQKPGKAPKRLIYAASSLESGVPSRFSGSGSGTEFTLTISSLQPEDFATYYCLQHNTYPFTFGPGTRVDIK

SEQ ID NO: 2048 - protein, 108 aa, Homo sapiens
EIVLTQSPGTLSLSPGERATLSCRASQSVSSSYLAWYQQKPGQAPRLLIYGVSSRATGIPDRFSGSGSGTDFTLTISRLEPEDFVVYYCHQYGSSPWTFGQGTKVEIK

SEQ ID NO: 2049 - protein, 106 aa, Homo sapiens
DIQMIQSPSSVSASVGDRVTITCRASQGISSWLAWYQQKPGKAPKLLIYAASTLLSAVPSRFSGSGSGTDFTLTISSLQPEDFATYYCQQGNSFPFTFGPGTIVDV

SEQ ID NO: 2050 - protein, 107 aa, Homo sapiens; identical to SEQ ID NO: 2047

SEQ ID NO: 2051 - protein, 106 aa, Homo sapiens
DIQMTQSPSSVSASVGDRVTITCRASQGISSWLAWYQQKPGKAPKLLIYAASTLLSAVPSRFSGSGSGTDFTLTISSLQPEDFATYYCQQGNSFPFTFGPGTKVDV

SEQ ID NO: 2052 - protein, 107 aa, Homo sapiens; identical to SEQ ID NO: 2047

SEQ ID NO: 2053 - protein, 108 aa, Homo sapiens
EIVLTQSPGTLSLSPGERATLSCRASHSVDRSYLAWYQQKPGLAPRLLIYGASSRATGIPDRFSGSGSGTDFTLTISRLEPEDFALYYCQHFGTSSVTFGRGTRLEIK

SEQ ID NO: 2054 - protein, 108 aa, Homo sapiens
EIVLTQSPGTLSLSPGERATLSCRASQSVSSSYLAWYQHKPGQAPRLLICGASSRATGIPDRFSGSGSGTGFTLTISRLEPEDFAVYYCQQYGSSPWTFGQGTKVEIK

SEQ ID NO: 2055 - protein, 110 aa, Homo sapiens; identical to SEQ ID NO: 1829

SEQ ID NO: 2056 - protein, 107 aa, Homo sapiens [sequence omitted]

SEQ ID NO: 2057 - protein, 14 aa, Homo sapiens
ARRGDGLYYYGMDV

SEQ ID NO: 2058 - protein, 18 aa, Homo sapiens
ARDRIAPVGKFFGWYFDL

SEQ ID NO: 2059 - protein, 10 aa, Homo sapiens
ARSSSRGFDY

SEQ ID NO: 2060 - protein, 16 aa, Homo sapiens
ARELFTAVAGKGGIDY

SEQ ID NO: 2061 - protein, 22 aa, Homo sapiens
AKDFKGGSSSWYTPEIEYGMDV

SEQ ID NO: 2062 - protein, 28 aa, Homo sapiens
ARLIRHEAHTYCSGGSCYSPDYYYGMDV

SEQ ID NO: 2063 - protein, 13 aa, Homo sapiens
ASNPPLGEPYFDI

SEQ ID NO: 2064 - protein, 12 aa, Homo sapiens
ARWGGGMQYLDV

SEQ ID NO: 2065 - protein, 19 aa, Homo sapiens
ARAGPNYDFWSGYYQTFDY

SEQ ID NO: 2066 - protein, 17 aa, Homo sapiens
ATATAMDGYYYYYGMDV

SEQ ID NO: 2067 - protein, 14 aa, Homo sapiens
ASAGSSWYGDAFDI

SEQ ID NO: 2068 - protein, 15 aa, Homo sapiens
ATATIFGVANNWFDP

SEQ ID NO: 2069 - protein, 25 aa, Homo sapiens
AKDLGYYDILTGQLGGYYYYYGMDV

SEQ ID NO: 2070 - protein, 19 aa, Homo sapiens
ARDWDYDILTGSWFGAFDI

SEQ ID NO: 2071 - protein, 15 aa, Mus musculus
ARKDYYYGSSYAMDY

SEQ ID NO: 2072 - protein, 14 aa, Mus musculus
ARDYGSSYVDYFDY

SEQ ID NO: 2073 - protein, 14 aa, Mus musculus
STGGYGNYVDAMDY

SEQ ID NO: 2074 - protein, 15 aa, Mus musculus
ARKDYYGSSSNVMDY

SEQ ID NO: 2075 - protein, 14 aa, Mus musculus
ARKDYYGSSLAMDY

SEQ ID NO: 2076 - protein, 14 aa, Mus musculus
ARRNYDLYYYAMDY

SEQ ID NO: 2077 - protein, 17 aa, Mus musculus
ARSDYYGSSYVGYAMDY

SEQ ID NO: 2078 - protein, 14 aa, Mus musculus
ARRNYDLYYYAMDY

SEQ ID NO: 2079 - protein, 14 aa, Mus musculus
STGGYGNYVDAMDY

SEQ ID NO: 2080 - protein, 15 aa, Mus musculus
ARKDYYGSSSNVMDY

SEQ ID NO: 2081 - protein, 14 aa, Mus musculus
SRRNYDLYYYAMDY

SEQ ID NO: 2082 - protein, 7 aa, Mus musculus
ARGAGAY

SEQ ID NO: 2083 - protein, 7 aa, Mus musculus
ARDHGPA

SEQ ID NO: 2084 - protein, 7 aa, Mus musculus
ARGAGAY

SEQ ID NO: 2085 - protein, 13 aa, Mus musculus
ARISYYDYEGVDY

SEQ ID NO: 2086 - protein, 20 aa, Homo sapiens
ARGAEYYDFWSGYYSAYFDY

SEQ ID NO: 2087 - protein, 14 aa, Mus musculus
ARKDYYGRYYGMDY

SEQ ID NO: 2088 - protein, 11 aa, Mus musculus
AILDSYWYFDV

SEQ ID NO: 2089 - protein, 12 aa, Mus musculus
ARKSYGYWHFDV

SEQ ID NO: 2090 - protein, 7 aa, Mus musculus
AAGKGDY

SEQ ID NO: 2091 - protein, 11 aa, Mus musculus
AILDSYWYFDV

SEQ ID NO: 2092 - protein, 7 aa, Mus musculus
AAGKGDY

SEQ ID NO: 2093 - protein, 13 aa, Mus musculus
ARKGDGYYGGFAY

SEQ ID NO: 2094 - protein, 15 aa, Mus musculus
ATYGSYYLYYYAMNY

SEQ ID NO: 2095 - protein, 14 aa, Mus musculus
ARYDGNLYYYAMDY

SEQ ID NO: 2096 - protein, 13 aa, Mus musculus
ARWDFYGSRTFDY

SEQ ID NO: 2097 - protein, 13 aa, Mus musculus
ARWDFYGSRTFDY

SEQ ID NO: 2098 - protein, 13 aa, Homo sapiens
ARATWLRGVMDVW

SEQ ID NO: 2099 - protein, 19 aa, Homo sapiens
AKDVRYCSSTSCYFSAFDI

SEQ ID NO: 2100 - protein, 13 aa, Homo sapiens
ARGGGSYYYWFDP

SEQ ID NO: 2101 - protein, 17 aa, Homo sapiens
ARAGYSSSWYGVRGVDP

SEQ ID NO: 2102 - protein, 17 aa, Homo sapiens
AKGSDIVVVPVGNWFDP

SEQ ID NO: 2103 - protein, 20 aa, Homo sapiens
ARVQRYYPDSSGFYGRRFDI

SEQ ID NO: 2104 - protein, 14 aa, Homo sapiens
ARSGGGSYRGPFDY

SEQ ID NO: 2105 - protein, 16 aa, Homo sapiens
ARGDRIQLWLLDAFDI

SEQ ID NO: 2106 - protein, 17 aa, Homo sapiens
AKIGLGLGGLLRRYFDY

SEQ ID NO: 2107 - protein, 16 aa, Homo sapiens
GTRIMITWYSRRGMDG

SEQ ID NO: 2108 - protein, 25 aa, Homo sapiens
ARERGDSSGYYEIITTANRRFGMDV

SEQ ID NO: 2109 - protein, 17 aa, Homo sapiens
ARIPGWDRGTDRNWNDD

SEQ ID NO: 2110 - protein, 15 aa, Homo sapiens
ARTYSFDSSGYYYDY

SEQ ID NO: 2111 - protein, 17 aa, Homo sapiens
ARAFYDSNWSVGSYFDS

SEQ ID NO: 2112 - protein, 18 aa, Homo sapiens
AKDSVRREYTHARVPFDN

SEQ ID NO: 2113 - protein, 17 aa, Homo sapiens
AKSSKIFYLGESREVDY

SEQ ID NO: 2114 - protein, 19 aa, Homo sapiens
ARVEYYYGSGSYMPWYFDL

SEQ ID NO: 2115 - protein, 16 aa, Homo sapiens
ATYYYDSSGYSYGMDV

SEQ ID NO: 2116 - protein, 15 aa, Homo sapiens
TEEGSGSEGPIEFDY

SEQ ID NO: 2117 - protein, 16 aa, Homo sapiens
ARDNNYRNYYYYMDVW

SEQ ID NO: 2118 - protein, 20 aa, Homo sapiens
ARGALGCSSTSCYPNNFDYW

SEQ ID NO: 2119 - skipped

SEQ ID NO: 2120 - protein, 21 aa, Homo sapiens
ATSTAVAGTPDLFDYYYGMDV

SEQ ID NO: 2121 - protein, 13 aa, Homo sapiens
ARDFISRPRGYRW

SEQ ID NO: 2122 - protein, 13 aa, Homo sapiens
ARDFISRPRGYRW

SEQ ID NO: 2123 - protein, 16 aa, Homo sapiens
ARGQDDFWSMNWFDPW

SEQ ID NO: 2124 - protein, 13 aa, Homo sapiens
ARDFISRPRGYRW

SEQ ID NO: 2125 - protein, 17 aa, Homo sapiens
TRGSQWATINDARFDYW

SEQ ID NO: 2126 - protein, 13 aa, Homo sapiens
ARVWYYYGPRDYW

SEQ ID NO: 2127 - protein, 16 aa, Homo sapiens
AKDSSSWYNYYGMDVW

SEQ ID NO: 2128 - protein, 14 aa, Homo sapiens
ARVFRGSQYWFDPW

SEQ ID NO: 2129 - protein, 13 aa, Homo sapiens
ARMEAPKLTLDPW

SEQ ID NO: 2130 - protein, 19 aa, Homo sapiens
ARDWDYDILTGSWFGAFDI

SEQ ID NO: 2131 - protein, 13 aa, Homo sapiens
ARPTIGYSYGSDY

SEQ ID NO: 2132 - protein, 18 aa, Homo sapiens
AKVSAIFWLGQGLSPIDV

SEQ ID NO: 2133 - protein, 14 aa, Homo sapiens
ARVQVAAAGSPYDY

SEQ ID NO: 2134 - protein, 16 aa, Homo sapiens
AKDRGYEILTPASFDY

SEQ ID NO: 2135 - protein, 15 aa, Homo sapiens
ATGRYTYGYGYYFDY

SEQ ID NO: 2136 - protein, 13 aa, Homo sapiens
ARDYGGNSNYFHY

SEQ ID NO: 2137 - protein, 11 aa, Homo sapiens
ARIQRGIAADY

SEQ ID NO: 2138 - protein, 11 aa, Homo sapiens
ARDKWEGTFDY

SEQ ID NO: 2139 - protein, 10 aa, Homo sapiens
AETGWDGMDV

SEQ ID NO: 2140 - protein, 16 aa, Homo sapiens
ARHCPWQQLVSNWFDP

SEQ ID NO: 2141 - protein, 21 aa, Homo sapiens
AREKIRSIAAAGTVYYYGMDV

SEQ ID NO: 2142 - protein, 21 aa, Homo sapiens
ARIYRGTMVVVFSDLHWYFDL

SEQ ID NO: 2143 - protein, 12 aa, Homo sapiens
AGLFWYGGYFDY

SEQ ID NO: 2144 - protein, 16 aa, Homo sapiens
ASTYWDSSGYYYGVDY

SEQ ID NO: 2145 - protein, 22 aa, Homo sapiens
AVLDYCSGGSSSSGYYNYGMDV

SEQ ID NO: 2146 - protein, 15 aa, Homo sapiens
ARDSLFSRVDWYFDL

SEQ ID NO: 2147 - protein, 15 aa, Homo sapiens
ALAVGRGIPTSYFDY

SEQ ID NO: 2148 - protein, 13 aa, Homo sapiens
AREGAGLIIAYDY

SEQ ID NO: 2149 - protein, 16 aa, Homo sapiens
ARDGALYSNSPTEFDY

SEQ ID NO: 2150 - protein, 15 aa, Homo sapiens
AKGGNYGDYLRGFDY

SEQ ID NO: 2151 - protein, 19 aa, Homo sapiens
VRGDHSSGWYGTYYYYMDV

SEQ ID NO: 2152 - protein, 24 aa, Homo sapiens
ARGLQYYYDTSGYYKDSYYYGVDV

SEQ ID NO: 2153 - protein, 12 aa, Homo sapiens
ARDLNIAGGFDI

SEQ ID NO: 2154 - protein, 17 aa, Homo sapiens
ARDLAWFGELSESPIEY

SEQ ID NO: 2155 - protein, 23 aa, Homo sapiens
AHRLAPDYDFLTGYYNGDDAFDV

SEQ ID NO: 2156 - protein, 18 aa, Homo sapiens
AREGLLVGPTGRGLGMDV

SEQ ID NO: 2157 - protein, 12 aa, Homo sapiens
ARMVVRGVMLDY

SEQ ID NO: 2158 - protein, 13 aa, Homo sapiens
ATRTGWTNDAFDI

SEQ ID NO: 2159 - protein, 14 aa, Homo sapiens
ARARQLVLNWYFDL

SEQ ID NO: 2160 - protein, 12 aa, Homo sapiens
ARLMYYYGNFDY

SEQ ID NO: 2161 - protein, 19 aa, Homo sapiens
ARVGYYGSGSYPLYWYFDL

SEQ ID NO: 2162 - protein, 15 aa, Homo sapiens
ATGRYTYGYGYYFDY

SEQ ID NO: 2163 - protein, 17 aa, Homo sapiens
ARLASDGSGSYLDYFDY

SEQ ID NO: 2164 - protein, 20 aa, Homo sapiens
ATDGGGGSYYYAHYYYGMDV

SEQ ID NO: 2165 - protein, 18 aa, Homo sapiens
AKDIGVMVPGVTPYGMDV

SEQ ID NO: 2166 - protein, 11 aa, Homo sapiens
ARDPMRPGMDV

SEQ ID NO: 2167 - protein, 13 aa, Homo sapiens
ARESPKLTGYFDY

SEQ ID NO: 2168 - protein, 15 aa, Homo sapiens
ARGRYTYGTEGYFDN

SEQ ID NO: 2169 - protein, 14 aa, Homo sapiens
ARDAVGSYYYGMEV

SEQ ID NO: 2170 - protein, 14 aa, Homo sapiens
AREGLVGTTLTFDY

SEQ ID NO: 2171 - protein, 13 aa, Homo sapiens
ARYYGPQGRAFDI

SEQ ID NO: 2172 - protein, 14 aa, Homo sapiens
ARGTEYGDYDVSHD

SEQ ID NO: 2173 - protein, 14 aa, Homo sapiens
AREGLVGTALAFDY

SEQ ID NO: 2174 - protein, 21 aa, Homo sapiens
AKDPTSLYCSGGSCYNNWFDP

SEQ ID NO: 2175 - protein, 11 aa, Homo sapiens
ARDLDYYGMDV

SEQ ID NO: 2176 - protein, 16 aa, Homo sapiens
AGGGVLVTSDPDAFDI

SEQ ID NO: 2177 - protein, 13 aa, Homo sapiens
AGEQHIVTTIIDY

SEQ ID NO: 2178 - protein, 11 aa, Homo sapiens
ARDYGDYYFDY

SEQ ID NO: 2179 - protein, 11 aa, Homo sapiens
ARQESGWSFDY

SEQ ID NO: 2180 - protein, 13 aa, Homo sapiens
AKGQRGSPDFFDY

SEQ ID NO: 2181 - protein, 9 aa, Homo sapiens
ARAGWELNY

SEQ ID NO: 2182 - protein, 11 aa, Homo sapiens
ARDLVTWGLDY

SEQ ID NO: 2183 - protein, 13 aa, Homo sapiens
STTNDYGDYSANY

SEQ ID NO: 2184 - protein, 19 aa, Homo sapiens
ARGLWFGDLTRTKYNWFDP

SEQ ID NO: 2185 - protein, 16 aa, Homo sapiens
ARDDSSSSGVGTGMDV

SEQ ID NO: 2186 - protein, 11 aa, Homo sapiens
ARITPHLVYDY

SEQ ID NO: 2187 - protein, 23 aa, Homo sapiens
ARTLGAYYDILTGFRTPGGWFAP

SEQ ID NO: 2188 - protein, 23 aa, Homo sapiens
ASPLLSHNYGSGSYYNVYWYFEL

SEQ ID NO: 2189 - protein, 11 aa, Homo sapiens
ARDLENGGLDV

SEQ ID NO: 2190 - protein, 16 aa, Homo sapiens
AAPNCNSTTCHDGFDI

SEQ ID NO: 2191 - protein, 13 aa, Homo sapiens
ARDLPLHGDYFDY

SEQ ID NO: 2192 - protein, 22 aa, Homo sapiens
ARHRRDYITMIVRPTRLWAFDY

SEQ ID NO: 2193 - protein, 13 aa, Homo sapiens
AREAGTTDWYFDL

SEQ ID NO: 2194 - protein, 18 aa, Homo sapiens
ARHPRFSWRGNDSGYFDY

SEQ ID NO: 2195 - protein, 16 aa, Homo sapiens
AHSMVRGVLFGADFDY

SEQ ID NO: 2196 - protein, 15 aa, Homo sapiens
ARDGVDFGMVTLFDY

SEQ ID NO: 2197 - protein, 15 aa, Homo sapiens
AITSVARGLRGYFDT

SEQ ID NO: 2198 - protein, 15 aa, Homo sapiens
AITSLARGLKGYFDS

SEQ ID NO: 2199 - protein, 17 aa, Homo sapiens
ARGWTVPPLWVLNWFDP

SEQ ID NO: 2200 - protein, 18 aa, Homo sapiens
AMTYYDYIWGRVDPQFDP

SEQ ID NO: 2201 - protein, 14 aa, Homo sapiens
ARFITDGYSSGSDS

SEQ ID NO: 2202 - protein, 20 aa, Homo sapiens
AKQASPYCSGGSCYSGNFDY

SEQ ID NO: 2203 - protein, 9 aa, Homo sapiens
AREAYGMDV

SEQ ID NO: 2204 - protein, 12 aa, Homo sapiens
ARDLGEAGGMDV

SEQ ID NO: 2205 - protein, 11 aa, Homo sapiens
ARDLVVYGMDV

SEQ ID NO: 2206 - protein, 11 aa, Homo sapiens
ARDLVVYGMDV

SEQ ID NO: 2207 - protein, 11 aa, Homo sapiens
ARDAMSYGMDV

SEQ ID NO: 2208 - protein, 11 aa, Homo sapiens
ARDAAVYGIDV

SEQ ID NO: 2209 - protein, 11 aa, Homo sapiens
ARDLISRGMDV

SEQ ID NO: 2210 - protein, 11 aa, Homo sapiens
ARDRVVYGMDV

SEQ ID NO: 2211 - protein, 11 aa, Homo sapiens
ARDLVSYGMDV

SEQ ID NO: 2212 - protein, 11 aa, Homo sapiens
ARDLVVYGMDV

SEQ ID NO: 2213 - protein, 11 aa, Homo sapiens
ARDAQNYGMDV

SEQ ID NO: 2214 - protein, 11 aa, Homo sapiens
ARDLGPYGMDV

SEQ ID NO: 2215 - protein, 11 aa, Homo sapiens
ARDYGDYYFDY

SEQ ID NO: 2216 - protein, 19 aa, Homo sapiens
ARPQGGSSWYRDYYYGMDV

SEQ ID NO: 2217 - protein, 17 aa, Homo sapiens
AKEGRPSDIVVVVAFDY

SEQ ID NO: 2218 - protein, 11 aa, Homo sapiens
ARDYGDFYFDY

SEQ ID NO: 2219 - protein, 21 aa, Homo sapiens
ASPASRGYSGYDHGYYYYMDV

SEQ ID NO: 2220 - protein, 16 aa, Homo sapiens
AAPHCSGGSCLDAFDI

SEQ ID NO: 2221 - protein, 18 aa, Homo sapiens
ARRGDGSSSIYYYNYMDV

SEQ ID NO: 2222 - protein, 13 aa, Homo sapiens
AREFGDPEWYFDY

SEQ ID NO: 2223 - protein, 15 aa, Homo sapiens
ARDSPFSALGASNDY

SEQ ID NO: 2224 - protein, 16 aa, Homo sapiens
ARDGIVDTALVTWFDY

SEQ ID NO: 2225 - protein, 31 aa, Homo sapiens
ARGNRLLYCSSTSCYLDAVRQGYYYYYYMDV

SEQ ID NO: 2226 - protein, 20 aa, Homo sapiens
AKVTAPYCSGGSCYGGNFDY

SEQ ID NO: 2227 - protein, 19 aa, Homo sapiens
AKAGVRGIAAAGPDLNFDH

SEQ ID NO: 2228 - protein, 14 aa, Homo sapiens
ARDFDDSSFWAFDY

SEQ ID NO: 2229 - protein, 13 aa, Homo sapiens
ARVPREGTPGFDP

SEQ ID NO: 2230 - protein, 15 aa, Homo sapiens
ARVWQYYDSSGSFDY

SEQ ID NO: 2231 - protein, 21 aa, Homo sapiens
ARHAAAYYDRSGYYFIEYFQH

SEQ ID NO: 2232 - protein, 20 aa, Homo sapiens
AKASGIYCSGGDCYSYYFDY

SEQ ID NO: 2233 - protein, 15 aa, Homo sapiens
ARTMYYYDSSGSFDY

SEQ ID NO: 2234 - protein, 20 aa, Homo sapiens
AKASGIYCSGGNCYSYYFDY

SEQ ID NO: 2235 - protein, 17 aa, Homo sapiens
ARVGYDSSGYSGWYFDL

SEQ ID NO: 2236 - protein, 11 aa, Homo sapiens
VRDYGDFYFDY

SEQ ID NO: 2237 - protein, 11 aa, Homo sapiens
ARDYGDYYFDY

SEQ ID NO: 2238 - protein, 17 aa, Homo sapiens
ARKPLLYSDFSPGAFDI

SEQ ID NO: 2239 - protein, 17 aa, Homo sapiens
ARKPLLYSNLSPGAFDI

SEQ ID NO: 2240 - protein, 12 aa, Homo sapiens
ARGEGWELPYDY

SEQ ID NO: 2241 - protein, 24 aa, Homo sapiens
ARERPGGTYSNTWYTPTDTNWFDT

SEQ ID NO: 2242 - protein, 15 aa, Homo sapiens
ARGEAVAGTTGFFDY

SEQ ID NO: 2243 - protein, 13 aa, Homo sapiens
VRDGGRPGDAFDI

SEQ ID NO: 2244 - protein, 12 aa, Homo sapiens
AIQLWLRGGYDY

SEQ ID NO: 2245 - protein, 21 aa, Homo sapiens
ARSFRDDPRIAVAGPADAFDI

SEQ ID NO: 2246 - protein, 21 aa, Homo sapiens
ARVEDWGYCSSTNCYSGAFDI

SEQ ID NO: 2247 - protein, 14 aa, Homo sapiens
AREDYYDSSGSFDY

SEQ ID NO: 2248 - protein, 18 aa, Homo sapiens
ARGVNPDDILTGVDAFDI

SEQ ID NO: 2249 - protein, 11 aa, Homo sapiens
ARGDGELFFDQ

SEQ ID NO: 2250 - protein, 11 aa, Homo sapiens
TRWDGWSQHDY

SEQ ID NO: 2251 - protein, 11 aa, Homo sapiens
ARDFYHNWFDP

SEQ ID NO: 2252 - protein, 20 aa, Homo sapiens
ARDPIWFGELLSPPFVHFDY

SEQ ID NO: 2253 - protein, 20 aa, Homo sapiens
ASGYTGYDYFVRGDYYGLDV

SEQ ID NO: 2254 - protein, 20 aa, Homo sapiens
ARANHETTMDTYYYYYYMDV

SEQ ID NO: 2255 - protein, 12 aa, Homo sapiens
AREGMGMAAAGT

SEQ ID NO: 2256 - protein, 22 aa, Homo sapiens
ARAPLFPTGVLAGDYYYYGMDV

SEQ ID NO: 2257 - protein, 13 aa, Homo sapiens
ARESGDTTMAFDY

SEQ ID NO: 2258 - protein, 10 aa, Homo sapiens
ARDLSAAFDI

SEQ ID NO: 2259 - protein, 18 aa, Homo sapiens
AREGARVGATYDTYYFDY

SEQ ID NO: 2260 - protein, 16 aa, Homo sapiens
AAPYCSGGSCSDAFDI

SEQ ID NO: 2261 - protein, 12 aa, Homo sapiens
ARLQWLRGAFDI

SEQ ID NO: 2262 - protein, 18 aa, Homo sapiens
ATAHPRRIQGVFFLGPGV

SEQ ID NO: 2263 - protein, 18 aa, Homo sapiens
ANHPLASGDDYYHYYMDV

SEQ ID NO: 2264 - protein, 13 aa, Homo sapiens
ARSRPTPDWYFDL

SEQ ID NO: 2265 - protein, 15 aa, Homo sapiens
ARVNQAVTTPFSMDV

SEQ ID NO: 2266 - protein, 15 aa, Homo sapiens
ARGGDTAMGPEYFDY

SEQ ID NO: 2267 - protein, 16 aa, Homo sapiens
ARDSDVDTSMVTWFDY

SEQ ID NO: 2268 - protein, 16 aa, Homo sapiens
AKDPLITGPTYQYFHY

SEQ ID NO: 2269 - protein, 12 aa, Homo sapiens
ASSSGYLFHSDY

SEQ ID NO: 2270 - protein, 12 aa, Homo sapiens
AGGTWLRSSFDY

SEQ ID NO: 2271 - protein, 14 aa, Homo sapiens
AKGGAYSYYYYMDV

SEQ ID NO: 2272 - protein, 11 aa, Homo sapiens
ARDLYYYGMDV

SEQ ID NO: 2273 - protein, 17 aa, Homo sapiens
ARADLGYCTNGVCYVDY

SEQ ID NO: 2274 - protein, 23 aa, Homo sapiens
ARDSSEVRDHPGHPGRSVGAFDI

SEQ ID NO: 2275 - protein, 25 aa, Homo sapiens
AREGEVEGYNDFWSGYSRDRYYFDY

SEQ ID NO: 2276 - protein, 25 aa, Homo sapiens
AREGEVEGYYDFWSGYSRDRYYFDY

SEQ ID NO: 2277 - protein, 13 aa, Homo sapiens
ARDVASNYAYFDL

SEQ ID NO: 2278 - protein, 13 aa, Homo sapiens
ARLSDRWYSPFDP

SEQ ID NO: 2279 - protein, 9 aa, Homo sapiens
ARIANYMDV

SEQ ID NO: 2280 - protein, 20 aa, Homo sapiens
ARPTAVAAAGNYFYYYGMDV

SEQ ID NO: 2281 - protein, 13 aa, Homo sapiens
ARERGYDGGKTPP

SEQ ID NO: 2282 - protein, 16 aa, Homo sapiens
ARVGGAHSGYDGSFDY

SEQ ID NO: 2283 - protein, 20 aa, Homo sapiens
AKQAGPYCSGGSCYSAPFDY

SEQ ID NO: 2284 - protein, 11 aa, Homo sapiens
ARDFGEFYFDY

SEQ ID NO: 2285 - protein, 17 aa, Homo sapiens
AKDPFPLAVAGTGYFDY

SEQ ID NO: 2286 - protein, 23 aa, Homo sapiens
ARDSSEVRDHPGHPGRSVGAFDI

SEQ ID NO: 2287 - protein, 15 aa, Homo sapiens
ARDLLDPQLDDAFDI

SEQ ID NO: 2288 - protein, 14 aa, Homo sapiens
VKGVEYSSSSNFDY

SEQ ID NO: 2289 - protein, 11 aa, Homo sapiens
ARDTLGRGGDY

SEQ ID NO: 2290 - protein, 19 aa, Homo sapiens
ARESDCGSTSCYQVGWFDP

SEQ ID NO: 2291 - protein, 17 aa, Homo sapiens
ARGPERGIVGATDYFDY

SEQ ID NO: 2292 - protein, 14 aa, Homo sapiens
AKEPIGQPLLWWDY

SEQ ID NO: 2293 - protein, 12 aa, Homo sapiens
ARGPNLQNWFDP

SEQ ID NO: 2294 - protein, 11 aa, Homo sapiens
ARDLMAYGMDV

SEQ ID NO: 2295 - protein, 11 aa, Homo sapiens
ARDYGDFYFDF

SEQ ID NO: 2296 - protein, 13 aa, Homo sapiens
ARERYFDLGGMDV

SEQ ID NO: 2297 - protein, 13 aa, Homo sapiens
ARDVGRVTTWFDP

SEQ ID NO: 2298 - protein, 15 aa, Homo sapiens
ASEEDYSNYVGWFDP

SEQ ID NO: 2299 - protein, 16 aa, Homo sapiens
ARDRGSSGWYGWYFDL

SEQ ID NO: 2300 - protein, 23 aa, Homo sapiens
AREGYCSGGSCYSGYYYYYGMDV

SEQ ID NO: 2301 - protein, 13 aa, Homo sapiens
ARVLPMYGDYLDY

SEQ ID NO: 2302 - protein, 11 aa, Homo sapiens
ARDLDVYGLDV

SEQ ID NO: 2303 - protein, 13 aa, Homo sapiens
ARGPRYSGTHFDY

SEQ ID NO: 2304 - protein, 13 aa, Homo sapiens
ARGPRYSGTYFDY

SEQ ID NO: 2305 - protein, 13 aa, Homo sapiens
ARGPRYSGTYFDY

SEQ ID NO: 2306 - protein, 17 aa, Homo sapiens
ARDPYGYSSIWDGQGGH

SEQ ID NO: 2307 - protein, 26 aa, Homo sapiens
ARGGYCSDGSCYVQDRLIYYYSGLDV

SEQ ID NO: 2308 - protein, 22 aa, Homo sapiens
ARDRRRRYCTNGVCYRPEEIDY

SEQ ID NO: 2309 - protein, 17 aa, Homo sapiens
ARDPFPGAVAGTGYLQY

SEQ ID NO: 2310 - protein, 16 aa, Homo sapiens
AKSSGSYYYYYYGMDV

SEQ ID NO: 2311 - protein, 13 aa, Homo sapiens
ARLHCGGDCYLDY

SEQ ID NO: 2312 - protein, 20 aa, Homo sapiens
AKGSGSGSYPNYYYYYGMDV

SEQ ID NO: 2313 - protein, 11 aa, Homo sapiens
ARDYGDLYFDY

SEQ ID NO: 2314 - protein, 27 aa, Homo sapiens
AKDQAYYDILTGYLNPPKNYYYYGMDV

SEQ ID NO: 2315 - protein, 14 aa, Homo sapiens
ATAFSIFGVVPPDY

SEQ ID NO: 2316 - protein, 15 aa, Homo sapiens
ARQGDCSTTSCAYDY

SEQ ID NO: 2317 - protein, 14 aa, Homo sapiens
AKDRTGNYYYGMDV

SEQ ID NO: 2318 - protein, 18 aa, Homo sapiens
AKDRYYEFWSGYSNWFDP

SEQ ID NO: 2319 - protein, 18 aa, Homo sapiens
ARVNYYDSSGYPSFHFDY

SEQ ID NO: 2320 - protein, 17 aa, Homo sapiens
AREMPAAMGYYYYGMDV

SEQ ID NO: 2321 - protein, 13 aa, Homo sapiens
AKANKYSSSEFDF

SEQ ID NO: 2322 - protein, 11 aa, Homo sapiens
ARDFGDFYFDY

SEQ ID NO: 2323 - protein, 19 aa, Homo sapiens
ATESWVYGSGSYSSGAFDI

SEQ ID NO: 2324 - protein, 13 aa, Homo sapiens
ARGPRYSGTYFDY

SEQ ID NO: 2325 - protein, 13 aa, Homo sapiens
ARGPRYSGTYFDY

SEQ ID NO: 2326 - protein, 13 aa, Homo sapiens
ARGPRYSGTYFDY

SEQ ID NO: 2327 - protein, 13 aa, Homo sapiens
ARGPRYSGTYFDY

SEQ ID NO: 2328 - protein, 13 aa, Homo sapiens
ARGPRYSGTYFDY

SEQ ID NO: 2329 - protein, 15 aa, Homo sapiens
AVYYYDSGSPGWFDP

SEQ ID NO: 2330 - protein, 18 aa, Homo sapiens
ARDFRYCSSTRCYFWFDP

SEQ ID NO: 2331 - protein, 12 aa, Homo sapiens
ARWYDSTGSIDY

SEQ ID NO: 2332 - protein, 14 aa, Homo sapiens
AKDQGYSYGNYFDY

SEQ ID NO: 2333 - protein, 11 aa, Homo sapiens
ALRNQWDLLVY

SEQ ID NO: 2334 - protein, 14 aa, Mus musculus
ARRGYGSSYTWFAY

SEQ ID NO: 2335 - protein, 15 aa, Homo sapiens
ARVSGYDSSGYWGDY

SEQ ID NO: 2336 - protein, 12 aa, Homo sapiens
ARDGELLGWFDP

SEQ ID NO: 2337 - protein, 17 aa, Homo sapiens
TRVRRLWFGSYYYGMDV

SEQ ID NO: 2338 - protein, 17 aa, Homo sapiens
TRVRRLWFGSYYYGMDV

SEQ ID NO: 2339 - protein, 13 aa, Homo sapiens
ARASVSTITDFDY

SEQ ID NO: 2340 - protein, 13 aa, Homo sapiens
ARASVATITDFDY

SEQ ID NO: 2341 - protein, 14 aa, Homo sapiens
ARPQSGGYYAPLDY

SEQ ID NO: 2342 - protein, 16 aa, Homo sapiens
AKVSATYYYYYYGMDV

SEQ ID NO: 2343 - protein, 19 aa, Homo sapiens
ARDTATYVLLWSGDFNLDY

SEQ ID NO: 2344 - protein, 14 aa, Homo sapiens
ARGHTGNYYYGMDV

SEQ ID NO: 2345 - protein, 20 aa, Homo sapiens
AKGGDSSGWAWDGDNPPTDY

SEQ ID NO: 2346 - protein, 15 aa, Homo sapiens
AMGPFGELLPYYFDY

SEQ ID NO: 2347 - protein, 14 aa, Homo sapiens
AAAPAVMTAGWFDP

SEQ ID NO: 2348 - protein, 10 aa, Homo sapiens
VRGAMAWFDP

SEQ ID NO: 2349 - protein, 14 aa, Homo sapiens
ATQPAAIGGTPPYY

SEQ ID NO: 2350 - protein, 21 aa, Homo sapiens
ARDQGPTYYYGSGSPHYGMDV

SEQ ID NO: 2351 - protein, 20 aa, Homo sapiens
AKGGDSSGWAWDGDNPPTDY

SEQ ID NO: 2352 - protein, 21 aa, Homo sapiens
ATSFPIRGDPSYYYYYYGMDV

SEQ ID NO: 2353 - protein, 12 aa, Homo sapiens
AIYGYYYYGLDV

SEQ ID NO: 2354 - protein, 20 aa, Homo sapiens
AKGGDSSGWAWDGDNPPTDY

SEQ ID NO: 2355 - protein, 13 aa, Homo sapiens
ARPTAGAGGAFDI

SEQ ID NO: 2356 - protein, 14 aa, Homo sapiens
ARTEWLLSDNWFDS

SEQ ID NO: 2357 - protein, 15 aa, Homo sapiens
ARGGLVPAARNAFDI

SEQ ID NO: 2358 - protein, 13 aa, Homo sapiens
ARPTAGAGGAFDT

SEQ ID NO: 2359 - protein, 20 aa, Homo sapiens
ARDLPIKVVVPAADYNWFDP

SEQ ID NO: 2360 - protein, 14 aa, Homo sapiens
AHRRGILTEDAFDI

SEQ ID NO: 2361 - protein, 11 aa, Homo sapiens
ARDLNEHGLDV

SEQ ID NO: 2362 - protein, 15 aa, Homo sapiens
ARGTLIPAHRGAFDI

SEQ ID NO: 2363 - protein, 15 aa, Homo sapiens
ARARPDYYYYYAMDV

SEQ ID NO: 2364 - protein, 16 aa, Homo sapiens
AKAHSTGHQYYYGMDV

SEQ ID NO: 2365 - protein, 23 aa, Homo sapiens
ARVVVLGYGRPNNYYDGRNVWDY

SEQ ID NO: 2366 - protein, 9 aa, Homo sapiens
ARGVVTYDY

SEQ ID NO: 2367 - protein, 17 aa, Homo sapiens
ARGRGYSNYGASYYMDV

SEQ ID NO: 2368 - protein, 14 aa, Homo sapiens
AKGRGAGYTSYMDV

SEQ ID NO: 2369 - protein, 16 aa, Homo sapiens
ARMRTGWPTHGRPDDF

SEQ ID NO: 2370 - protein, 16 aa, Homo sapiens
ARSYDILTGYRDAFDI

SEQ ID NO: 2371 - protein, 16 aa, Homo sapiens
ARVGYSQGYYYYYMDV

SEQ ID NO: 2372 - protein, 16 aa, Homo sapiens
AAPHCNRTSCYDAFDL

SEQ ID NO: 2373 - protein, 18 aa, Homo sapiens
ARVGVSGFKSGSNWYFDL

SEQ ID NO: 2374 - protein, 11 aa, Homo sapiens
ARDLVTYGLDV

SEQ ID NO: 2375 - protein, 22 aa, Homo sapiens
AVIMSPIPRYSGYDWAGGAFDI

SEQ ID NO: 2376 - protein, 20 aa, Homo sapiens
AKNLGPYCSGGTCYSLVGDY

SEQ ID NO: 2377 - protein, 22 aa, Homo sapiens
AVIMSPIPRYSGYDWAGDAFDI

SEQ ID NO: 2378 - protein, 16 aa, Homo sapiens
ARMRSGWPTHGRPDDF

SEQ ID NO: 2379 - protein, 14 aa, Homo sapiens
AKDIIRQGEDGMDV

SEQ ID NO: 2380 - protein, 10 aa, Homo sapiens
VKGLFDWFPL

SEQ ID NO: 2381 - protein, 12 aa, Homo sapiens
ARLGFYYGGADY

SEQ ID NO: 2382 - protein, 15 aa, Homo sapiens
AKGVDYGGKLAYFDS

SEQ ID NO: 2383 - protein, 16 aa, Homo sapiens
ARDIDSGYDPTPVFDY

SEQ ID NO: 2384 - protein, 16 aa, Homo sapiens
ARVLYDSSGFYNWFDP

SEQ ID NO: 2385 - protein, 10 aa, Homo sapiens
ARDFLRWHDL

SEQ ID NO: 2386 - protein, 17 aa, Homo sapiens
ARGRGYSNYGASYYMDV

SEQ ID NO: 2387 - protein, 14 aa, Homo sapiens
ARILVIFTLNWFDP

SEQ ID NO: 2388 - protein, 22 aa, Homo sapiens
TTAGSYYYDTVGPGLPEGKFDY

SEQ ID NO: 2389 - protein, 10 aa, Homo sapiens
ARDFLRWHDL

SEQ ID NO: 2390 - protein, 14 aa, Homo sapiens
AGSPVPPTIVGASY

SEQ ID NO: 2391 - protein, 14 aa, Homo sapiens
ARRGEAAGIWYFDL

SEQ ID NO: 2392 - protein, 18 aa, Homo sapiens
AKEGGSGSLRYYYYGMDV

SEQ ID NO: 2393 - protein, 17 aa, Homo sapiens
ARRSYRSSWYYYYGMDV

SEQ ID NO: 2394 - protein, 14 aa, Homo sapiens
ARSTSGSYYYGMDV

SEQ ID NO: 2395 - protein, 17 aa, Homo sapiens
ARDWAPTYYDMPSAFDI

SEQ ID NO: 2396 - protein, 12 aa, Homo sapiens
ARIGSYPEYFQH

SEQ ID NO: 2397 - protein, 13 aa, Homo sapiens
ARGGSGSYSLFDY

SEQ ID NO: 2398 - protein, 14 aa, Homo sapiens
ARSTSGSYYYGMDV

SEQ ID NO: 2399 - protein, 14 aa, Homo sapiens
ARSTSGSYYYGMDV

SEQ ID NO: 2400 - protein, 11 aa, Homo sapiens
ARDLVTYGLDV

SEQ ID NO: 2401 - protein, 15 aa, Homo sapiens
ARIGHFDSSGYYLDY

SEQ ID NO: 2402 - protein, 12 aa, Homo sapiens
ARLSGSSWDFDY

SEQ ID NO: 2403 - protein, 22 aa, Homo sapiens
ARRRSSSRYSSGWYMYYYYMDV

SEQ ID NO: 2404 - protein, 12 aa, Homo sapiens
ARLSGSSWDFDY

SEQ ID NO: 2405 - protein, 12 aa, Homo sapiens
AHRLWFRDAFDI

SEQ ID NO: 2406 - protein, 12 aa, Homo sapiens
ARVGSSSWYFDY

SEQ ID NO: 2407 - protein, 14 aa, Homo sapiens
ARADTMVRGTYFEY

SEQ ID NO: 2408 - protein, 10 aa, Homo sapiens
ARGGATNFDY

SEQ ID NO: 2409 - protein, 19 aa, Homo sapiens
TKASRYCSSTICYWNWFDP

SEQ ID NO: 2410 - protein, 19 aa, Homo sapiens
AREARSRYFDWLPSYYFDY

SEQ ID NO: 2411 - protein, 22 aa, Homo sapiens
ARRRSSSRYSSGWYMYYYYMDV

SEQ ID NO: 2412 - protein, 20 aa, Homo sapiens
AKGGDGSGWAWDGDNPPTDY

SEQ ID NO: 2413 - protein, 16 aa, Homo sapiens
AAPYCSSISCNDGFDI

SEQ ID NO: 2414 - protein, 17 aa, Homo sapiens
ARPDYSSGWFSYWYFDL

SEQ ID NO: 2415 - protein, 14 aa, Homo sapiens
ATGFAVFGRAAVPY

SEQ ID NO: 2416 - protein, 14 aa, Homo sapiens
ARGSAGNYYYGMDV

SEQ ID NO: 2417 - protein, 14 aa, Homo sapiens
ASALRERGVQLWSV

SEQ ID NO: 2418 - protein, 15 aa, Homo sapiens
ARDQEWFRELFLFDY

SEQ ID NO: 2419 - protein, 21 aa, Homo sapiens
ARVNGNSNWNFGSYYYYYMDV

SEQ ID NO: 2420 - protein, 15 aa, Homo sapiens
ARIGHFDSSGYYLDY

SEQ ID NO: 2421 - protein, 17 aa, Homo sapiens
ARWLQLRSDYYYFGMDV

SEQ ID NO: 2422 - protein, 15 aa, Homo sapiens
ARTSHYDSSGSYFEY

SEQ ID NO: 2423 - protein, 14 aa, Homo sapiens
ARPYTGSYKSYMDV

SEQ ID NO: 2424 - protein, 17 aa, Homo sapiens
ARAPRERLQWGEYYFDY

SEQ ID NO: 2425 - protein, 11 aa, Homo sapiens
AKDGSIAAADY

SEQ ID NO: 2426 - protein, 14 aa, Homo sapiens
ATHRCSGGFCYLAY

SEQ ID NO: 2427 - protein, 21 aa, Homo sapiens
ARDQSQGAYILTGYRGYGMDV

SEQ ID NO: 2428 - protein, 17 aa, Homo sapiens
ARPPQAARIHYYYYMDV

SEQ ID NO: 2429 - protein, 14 aa, Homo sapiens
AKGRGAGYTSYMDV

SEQ ID NO: 2430 - protein, 6 aa, Homo sapiens
ARESTQ

SEQ ID NO: 2431 - protein, 11 aa, Homo sapiens
AHRAVILNFDH

SEQ ID NO: 2432 - protein, 14 aa, Homo sapiens
ARPRSGSYYAYFDY

SEQ ID NO: 2433 - protein, 18 aa, Homo sapiens
AKVGYTISRQWLVGEFDY

SEQ ID NO: 2434 - protein, 14 aa, Homo sapiens
ARRGEAAGIWYFDL

SEQ ID NO: 2435 - protein, 15 aa, Homo sapiens
ARQSRGYSYAWSFDY

SEQ ID NO: 2436 - protein, 17 aa, Homo sapiens
AGSSGEGGLYYYYGMDV

SEQ ID NO: 2437 - protein, 15 aa, Homo sapiens
ARDSGGNYGDSYFDY

SEQ ID NO: 2438 - protein, 14 aa, Homo sapiens
ARGSAGNYYYGMDV

SEQ ID NO: 2439 - protein, 18 aa, Homo sapiens
ARIVLGASGTYPSPGFDP

SEQ ID NO: 2440 - protein, 12 aa, Homo sapiens
AGSPWLRGDIDY

SEQ ID NO: 2441 - protein, 20 aa, Homo sapiens
ARDPSYCSSTRCYTVGWFDP

SEQ ID NO: 2442 - protein, 13 aa, Homo sapiens
ARGHVAAWESCYY

SEQ ID NO: 2443 - protein, 23 aa, Homo sapiens
ARARGPSEQYYDLLTGYYDAFDI

SEQ ID NO: 2444 - protein, 15 aa, Homo sapiens
AQMGPLGSTSSAADY

SEQ ID NO: 2445 - protein, 23 aa, Homo sapiens
AREARYFDWIFEGSDYYYYGMDV

SEQ ID NO: 2446 - protein, 17 aa, Homo sapiens
ARRSYRSSWYYYYGMDV

SEQ ID NO: 2447 - protein, 20 aa, Homo sapiens
IRDYDFWGGYYYHPLRAFDI

SEQ ID NO: 2448 - protein, 11 aa, Homo sapiens
ARHQIVVLFDM

SEQ ID NO: 2449 - protein, 15 aa, Homo sapiens
AITYYYDSSGYWWDD

SEQ ID NO: 2450 - protein, 18 aa, Homo sapiens
AGEEVRGVKLYYYYAMDV

SEQ ID NO: 2451 - protein, 12 aa, Homo sapiens
ARDRGWNYGLDY

SEQ ID NO: 2452 - protein, 16 aa, Homo sapiens
ARDVPTTVTAFTVFTY

SEQ ID NO: 2453 - protein, 14 aa, Homo sapiens
ARVPVMVRGVYFDY

SEQ ID NO: 2454 - protein, 12 aa, Homo sapiens
ARGYGLTYYMDV

SEQ ID NO: 2455 - protein, 16 aa, Homo sapiens
ARMRSGWPTHGRPDDF

SEQ ID NO: 2456 - protein, 17 aa, Homo sapiens
AKNERITMLVVVTLFDY

SEQ ID NO: 2457 - protein, 18 aa, Homo sapiens
ARDPSAYYDILTGYSGDV

SEQ ID NO: 2458 - protein, 16 aa, Homo sapiens
ARDIDSGYDPTPVFDY

SEQ ID NO: 2459 - protein, 16 aa, Homo sapiens
ASRWGDYFDSSGAYDS

SEQ ID NO: 2460 - protein, 20 aa, Homo sapiens
ARDPVWVDGELLSGGIPFDY

SEQ ID NO: 2461 - protein, 21 aa, Homo sapiens
AILWRGSSWADRHYYYYSMDV

SEQ ID NO: 2462 - protein, 10 aa, Homo sapiens
ARDLGRGLDP

SEQ ID NO: 2463 - protein, 10 aa, Homo sapiens
VKGLFDWFPL

SEQ ID NO: 2464 - protein, 14 aa, Homo sapiens
ATGYIGTYYYYMDV

SEQ ID NO: 2465 - protein, 16 aa, Homo sapiens
AKVSSITSLLGYYFDS

SEQ ID NO: 2466 - protein, 9 aa, Homo sapiens
ARGVVTYDY

SEQ ID NO: 2467 - protein, 12 aa, Homo sapiens
ARGDGYRSQFDP

SEQ ID NO: 2468 - protein, 12 aa, Homo sapiens
AHRLWFRDAFDI

SEQ ID NO: 2469 - protein, 21 aa, Homo sapiens
ARVEGDWLLGGPYYHYYGMDV

SEQ ID NO: 2470 - protein, 14 aa, Homo sapiens
ARILVIFTLNWFDP

SEQ ID NO: 2471 - protein, 12 aa, Homo sapiens
ARLGGSSWHFDY

SEQ ID NO: 2472 - protein, 23 aa, Homo sapiens
ARHDGSGEMDTITWGPIYYYMDV

SEQ ID NO: 2473 - protein, 12 aa, Homo sapiens
AHRLWFRDAFDI

SEQ ID NO: 2474 - protein, 12 aa, Homo sapiens
AMGPSAFSWLDP

SEQ ID NO: 2475 - protein, 14 aa, Homo sapiens
ARSTSGSYYYGMDV

SEQ ID NO: 2476 - protein, 15 aa, Homo sapiens
AHRPPSYHGWCYFDY

SEQ ID NO: 2477 - protein, 10 aa, Homo sapiens
ARVQRRRLDY

SEQ ID NO: 2478 - protein, 17 aa, Homo sapiens
ARPPQAARIHYYYYMDV

SEQ ID NO: 2479 - protein, 12 aa, Homo sapiens
ARRFYGPSSFDY

SEQ ID NO: 2480 - protein, 18 aa, Homo sapiens
ARGGEWRIVPGGRDYFDY

SEQ ID NO: 2481 - protein, 24 aa, Homo sapiens
ARLGVSKYCSGGRCLSGGSNWFDP

SEQ ID NO: 2482 - protein, 12 aa, Homo sapiens
ASSSWLRGAFDI

SEQ ID NO: 2483 - protein, 16 aa, Homo sapiens
AAPHCNRTSCYDAFDL

SEQ ID NO: 2484 - protein, 19 aa, Homo sapiens
SRVRGSFYGSVGKNYGMDV

SEQ ID NO: 2485 - protein, 16 aa, Homo sapiens
ARDIDSGYDPTPVFDY

SEQ ID NO: 2486 - protein, 15 aa, Homo sapiens
ARTSHYDSSGSYFEY

SEQ ID NO: 2487 - protein, 15 aa, Homo sapiens
ARRRGGIGIEYGMDV

SEQ ID NO: 2488 - protein, 18 aa, Homo sapiens
AKDFGGDNTAMVEYFFDF

SEQ ID NO: 2489 - protein, 14 aa, Homo sapiens
AGSPVPPTIVGASY

SEQ ID NO: 2490 - protein, 13 aa, Homo sapiens
AKGRGNYLTFFDS

SEQ ID NO: 2491 - protein, 21 aa, Homo sapiens
ARDPGSRYSGGWYDYYYAMDV

SEQ ID NO: 2492 - protein, 9 aa, Homo sapiens
ARRDTDFDY

SEQ ID NO: 2493 - protein, 16 aa, Homo sapiens
AAPYCSRTSCHDAFDI

SEQ ID NO: 2494 - protein, 18 aa, Homo sapiens
AKDLPPYASGWYEGGFDY

SEQ ID NO: 2495 - protein, 13 aa, Homo sapiens
AQGRGGYYSPFDD

SEQ ID NO: 2496 - protein, 16 aa, Homo sapiens
ARTTWGTWIQAWYFDI

SEQ ID NO: 2497 - protein, 17 aa, Homo sapiens
AREGDFWSGYYTGWFDP

SEQ ID NO: 2498 - protein, 17 aa, Homo sapiens
AKDLTIVVIPAAPNFDY

SEQ ID NO: 2499 - protein, 22 aa, Homo sapiens
AKDQARVQDYIWGSYRSYGMDV

SEQ ID NO: 2500 - protein, 14 aa, Homo sapiens
AKDIIRQGEDGMDV

SEQ ID NO: 2501 - protein, 16 aa, Homo sapiens
ARMRSGWPTHGRPDDF

SEQ ID NO: 2502 - protein, 17 aa, Homo sapiens
ARWLQLRSDYYYFGMDV

SEQ ID NO: 2503 - protein, 12 aa, Homo sapiens
ARLSGSSWDFDY

SEQ ID NO: 2504 - protein, 8 aa, Homo sapiens
ARDYRDWI

SEQ ID NO: 2505 - protein, 21 aa, Homo sapiens
AHNRFQYCSSTTCYTLLPFDY

SEQ ID NO: 2506 - protein, 14 aa, Homo sapiens
ARPYTGSYKSYMDV

SEQ ID NO: 2507 - protein, 19 aa, Homo sapiens
ARGDGDVYNFLLVRNWFDP

SEQ ID NO: 2508 - protein, 13 aa, Homo sapiens
ASLWFGDLYSFDY

SEQ ID NO: 2509 - protein, 12 aa, Homo sapiens
ARLGRSSWNFDY

SEQ ID NO: 2510 - protein, 17 aa, Homo sapiens
ARVGGISPYYYYYYMDV

SEQ ID NO: 2511 - protein, 16 aa, Homo sapiens
ARMRSGWPTHGRPDDY

SEQ ID NO: 2512 - protein, 14 aa, Homo sapiens
ASAKLVATISYFDY

SEQ ID NO: 2513 - protein, 13 aa, Homo sapiens
ARVGGYYYYYMDV

SEQ ID NO: 2514 - protein, 8 aa, Homo sapiens
AKPYGMDV

SEQ ID NO: 2515 - protein, 24 aa, Homo sapiens
ARDRSNLERLVMTFGGIIAGAFDI

SEQ ID NO: 2516 - protein, 14 aa, Homo sapiens
ARVNSGSYYSYFDY

SEQ ID NO: 2517 - protein, 16 aa, Homo sapiens
ASRWGDYFDSSGAYDS

SEQ ID NO: 2518 - protein, 11 aa, Homo sapiens
ARKGPLWRFDY

SEQ ID NO: 2519 - protein, 6 aa, Homo sapiens
ARESTQ

SEQ ID NO: 2520 - protein, 19 aa, Homo sapiens
ARAPFQLLDKYYFFYYMDV

SEQ ID NO: 2521 - protein, 10 aa, Homo sapiens
ARHIPAWGYK

SEQ ID NO: 2522 - protein, 17 aa, Homo sapiens
AKLLGSGITLDNDAFDI

SEQ ID NO: 2523 - protein, 15 aa, Homo sapiens
ARIGHFDSSGYYLDY

SEQ ID NO: 2524 - protein, 16 aa, Homo sapiens
AKDFGSGIVGATGFDF

SEQ ID NO: 2525 - protein, 22 aa, Homo sapiens
ARRRSSSRYSSGWYMYYYYMDV

SEQ ID NO: 2526 - protein, 14 aa, Homo sapiens
ATHRCSGGFCYLAY

SEQ ID NO: 2527 - protein, 17 aa, Homo sapiens
ARASYNSNWSIGEYFRD

SEQ ID NO: 2528 - protein, 20 aa, Homo sapiens
AKQGGLYCSGTNCWGGYLDY

SEQ ID NO: 2529 - protein, 11 aa, Homo sapiens
VHRHVSGAFDY

SEQ ID NO: 2530 - protein, 24 aa, Homo sapiens
ARARLLGYCSSTSCYTIGWGAFDI

SEQ ID NO: 2531 - protein, 11 aa, Homo sapiens
AREGQGTYLDY

SEQ ID NO: 2532 - protein, 19 aa, Homo sapiens
AREARSRYFDWLPSYYFDY

SEQ ID NO: 2533 - protein, 15 aa, Homo sapiens
ARDPSPLVLITSIDY

SEQ ID NO: 2534 - protein, 15 aa, Homo sapiens
ARRGNYYDSKNWFDP

SEQ ID NO: 2535 - protein, 13 aa, Homo sapiens
ARGGSGSYSLFDY

SEQ ID NO: 2536 - protein, 16 aa, Homo sapiens
ARVLYDSSGFYNWFDP

SEQ ID NO: 2537 - protein, 18 aa, Homo sapiens
ARDLGDGYNLRVPAYFDL

SEQ ID NO: 2538 - protein, 11 aa, Homo sapiens
ARVDHVNVRDY

SEQ ID NO: 2539 - protein, 21 aa, Homo sapiens
ARVNGNSNWNFGSYYYYYMDV

SEQ ID NO: 2540 - protein, 14 aa, Homo sapiens
AREGQMAATTGIDY

SEQ ID NO: 2541 - protein, 19 aa, Homo sapiens
TTLTYYYDSSAYLNDAFDI

SEQ ID NO: 2542 - protein, 14 aa, Homo sapiens
AKGIYYDIFMPLLD

SEQ ID NO: 2543 - protein, 14 aa, Homo sapiens
ARGVVAATPGWFDP

SEQ ID NO: 2544 - protein, 17 aa, Homo sapiens
ARGWFGELLKGTYWFDP

SEQ ID NO: 2545 - protein, 18 aa, Homo sapiens
ARVGVSGFKSGSNWYFDL

SEQ ID NO: 2546 - protein, 13 aa, Homo sapiens
AREVEQLAHMVDY

SEQ ID NO: 2547 - protein, 15 aa, Homo sapiens
ARQWKWFGEAWYFDL

SEQ ID NO: 2548 - protein, 17 aa, Homo sapiens
ARDPYDLYGDYGGTFDY

SEQ ID NO: 2549 - protein, 22 aa, Homo sapiens
AREDYYGSGSLVDPYYYYRMDV

SEQ ID NO: 2550 - protein, 15 aa, Homo sapiens
VRDLALFEVVIQQGV

SEQ ID NO: 2551 - protein, 19 aa, Homo sapiens
ARHTVDCGGDCFPNDAFDI

SEQ ID NO: 2552 - protein, 23 aa, Homo sapiens
ARVVVLGYGRPNNYYDGRNVWDY

SEQ ID NO: 2553 - protein, 14 aa, Homo sapiens
ARPRGGSYQTCFDY

SEQ ID NO: 2554 - protein, 15 aa, Homo sapiens
ARWGPDYGDYASNDY

SEQ ID NO: 2555 - protein, 22 aa, Homo sapiens
AVIMSPIPRYSGYDWAGDAFDI

SEQ ID NO: 2556 - protein, 10 aa, Homo sapiens
ARGLVGRIDP

SEQ ID NO: 2557 - protein, 15 aa, Homo sapiens
ARDQQIVPHADGFDI

SEQ ID NO: 2558 - protein, 12 aa, Homo sapiens
ARIGSYPEYFQH

SEQ ID NO: 2559 - protein, 14 aa, Homo sapiens
AKDIIRQGEDGMDV

SEQ ID NO: 2560 - protein, 22 aa, Homo sapiens
ARDVGGYSGYDLGFDYYYYMDV

SEQ ID NO: 2561 - protein, 19 aa, Homo sapiens
AKDRTAVFLFFGLGDAFDI

SEQ ID NO: 2562 - protein, 14 aa, Homo sapiens
ASALRERGVQLWSV

SEQ ID NO: 2563 - protein, 16 aa, Homo sapiens
AKDPASGIVGPTHFDY

SEQ ID NO: 2564 - protein, 14 aa, Homo sapiens
ATGFAVFGRAAVPY

SEQ ID NO: 2565 - protein, 19 aa, Homo sapiens
ARFRRSYGSGSYYNISFDY

SEQ ID NO: 2566 - protein, 12 aa, Homo sapiens
VREYGSGHPLPI

SEQ ID NO: 2567 - protein, 12 aa, Homo sapiens
ARATWLRDAFGI

SEQ ID NO: 2568 - protein, 16 aa, Homo sapiens
ARGFHVPAALRNWFDP

SEQ ID NO: 2569 - protein, 17 aa, Homo sapiens
AREANDSGSFYNGPFDY

SEQ ID NO: 2570 - protein, 17 aa, Homo sapiens
ARGGLLWFGGAGNYMDV

SEQ ID NO: 2571 - protein, 16 aa, Homo sapiens
ARMRTGWPTHGRPDDF

SEQ ID NO: 2572 - protein, 18 aa, Homo sapiens
ARGPPVTTFFVFSLLFDP

SEQ ID NO: 2573 - protein, 15 aa, Homo sapiens
AKEGEWELRGNALDI

SEQ ID NO: 2574 - protein, 13 aa, Homo sapiens
AREGQWPNQAFDI

SEQ ID NO: 2575 - protein, 16 aa, Homo sapiens
ASGPPYMATFSYYFDY

SEQ ID NO: 2576 - protein, 17 aa, Homo sapiens
ARDPIRDGVWGLNENDY

SEQ ID NO: 2577 - protein, 18 aa, Homo sapiens
ARSPPASYYNPSTGYFDY

SEQ ID NO: 2578 - protein, 15 aa, Homo sapiens
ARDVFWVPAASSFDY

SEQ ID NO: 2579 - protein, 15 aa, Homo sapiens
ARDQEWFRELFLFDY

SEQ ID NO: 2580 - protein, 16 aa, Homo sapiens
ARMRTGWPTHGRPDDF

SEQ ID NO: 2581 - protein, 19 aa, Homo sapiens
ARGWGWGAVAGRAEYYFDY

SEQ ID NO: 2582 - protein, 14 aa, Homo sapiens
ARAQGGNYYYGMDV

SEQ ID NO: 2583 - protein, 9 aa, Homo sapiens
ARGAASFDY

SEQ ID NO: 2584 - protein, 18 aa, Homo sapiens
ARDPRVVVTARMYNWFDP

SEQ ID NO: 2585 - protein, 18 aa, Homo sapiens
ARDQRQFQLLGRFGWFDP

SEQ ID NO: 2586 - protein, 15 aa, Homo sapiens
ARQWKWFGEAWYFDL

SEQ ID NO: 2587 - protein, 18 aa, Homo sapiens
ARDQDSGYPTYYYYYMDV

SEQ ID NO: 2588 - protein, 21 aa, Homo sapiens
ARGGIYYLVRGFIIGYYGMDV

SEQ ID NO: 2589 - protein, 13 aa, Homo sapiens
TTGGYSSYAASDY

SEQ ID NO: 2590 - protein, 17 aa, Homo sapiens
ARVDYYGSGSVYWYFDL

SEQ ID NO: 2591 - protein, 14 aa, Homo sapiens
AKVGWELSIDAFDL

SEQ ID NO: 2592 - protein, 12 aa, Homo sapiens
AHRLWFRDAFDI

SEQ ID NO: 2593 - protein, 12 aa, Homo sapiens
ARIQYQLNGMDV

SEQ ID NO: 2594 - protein, 23 aa, Homo sapiens
ARGRVGYVGSGSRGYYYYYDMDV

SEQ ID NO: 2595 - protein, 17 aa, Homo sapiens
ARPDYSSGWFSYWYFDL

SEQ ID NO: 2596 - protein, 12 aa, Homo sapiens
ARGRSYGLSLGY

SEQ ID NO: 2597 - protein, 13 aa, Homo sapiens
ARESADISSRLDY

SEQ ID NO: 2598 - protein, 12 aa, Homo sapiens
AHRLWFRDAFDI

SEQ ID NO: 2599 - protein, 14 aa, Homo sapiens
ASVITFGGVIVRSY

SEQ ID NO: 2600 - protein, 15 aa, Homo sapiens
ARVSGYGDYGAYSDY

SEQ ID NO: 2601 - protein, 14 aa, Homo sapiens
ASVITFGGVIVRSY

SEQ ID NO: 2602 - protein, 21 aa, Homo sapiens
ARVEGDWLLGGPYYHYYGMDV

SEQ ID NO: 2603 - protein, 14 aa, Homo sapiens
ARADTMVRGTYFEY

SEQ ID NO: 2604 - protein, 14 aa, Homo sapiens
ARDYCNGVTCNSNY

SEQ ID NO: 2605 - protein, 8 aa, Homo sapiens
ARGWYFDY

SEQ ID NO: 2606 - protein, 17 aa, Homo sapiens
ARVEGEGVDSYYYGMDV

SEQ ID NO: 2607 - protein, 14 aa, Homo sapiens
AKDIIRQGEDGMDV

SEQ ID NO: 2608 - protein, 15 aa, Homo sapiens
ARHPVDGYNYGYSDL

SEQ ID NO: 2609 - protein, 23 aa, Homo sapiens
ARVVVLGYGRPNNYYDGRNVWDY

SEQ ID NO: 2610 - protein, 14 aa, Homo sapiens
ARAGGGSYRGPFDY

SEQ ID NO: 2611 - protein, 14 aa, Homo sapiens
AKSYNGNYYDAFDI

SEQ ID NO: 2612 - protein, 14 aa, Homo sapiens
ARGSAGNYYYGMDV

SEQ ID NO: 2613 - protein, 20 aa, Homo sapiens
ARLTFGGSGSYYFYYNGMDV

SEQ ID NO: 2614 - protein, 19 aa, Homo sapiens
ARADPYQLLGQHYYYGMDV

SEQ ID NO: 2615 - protein, 20 aa, Homo sapiens
AKGGDGSGWAWDGDNPPTDY

SEQ ID NO: 2616 - protein, 18 aa, Homo sapiens
ARIVLGASGTYPSPGFDP

SEQ ID NO: 2617 - protein, 14 aa, Homo sapiens
AKDGSGSYYGWFDP

SEQ ID NO: 2618 - protein, 14 aa, Homo sapiens
ARSCGDCYSADLDF

SEQ ID NO: 2619 - protein, 12 aa, Homo sapiens
ARLLWLRGHFDY

SEQ ID NO: 2620 - protein, 22 aa, Homo sapiens
AVIMSPIPRYSGYDWAGGAFDI

SEQ ID NO: 2621 - protein, 10 aa, Homo sapiens
ARALNKGFDP

SEQ ID NO: 2622 - protein, 16 aa, Homo sapiens
AAPHCNRTSCYDAFDL

SEQ ID NO: 2623 - protein, 20 aa, Homo sapiens
ARDRLGDGSYLGGGYYGMDV

SEQ ID NO: 2624 - protein, 16 aa, Homo sapiens
ARMRSGWPTHGRPDDL

SEQ ID NO: 2625 - protein, 20 aa, Homo sapiens
ARDHSGYYDSTSLMSPFFDY

SEQ ID NO: 2626 - protein, 17 aa, Homo sapiens
ARDLAGVPAALGCWFDP

SEQ ID NO: 2627 - protein, 20 aa, Homo sapiens
AKNLGPYCSGGTCYSLVGDY

SEQ ID NO: 2628 - protein, 13 aa, Homo sapiens
ARARGGYNWNFDY

SEQ ID NO: 2629 - protein, 13 aa, Homo sapiens
ARDQGTVVTHFDY

SEQ ID NO: 2630 - protein, 20 aa, Homo sapiens
AKNLGPYCSGGTCYSLVGDY

SEQ ID NO: 2631 - protein, 16 aa, Homo sapiens
ARMRSGWPTHGRPDDH

SEQ ID NO: 2632 - protein, 20 aa, Homo sapiens
AKDEMAYPPSHHYYYYYMDV

SEQ ID NO: 2633 - protein, 16 aa, Homo sapiens
ARGPSILTGFYNPLDY

SEQ ID NO: 2634 - protein, 22 aa, Homo sapiens
ARRTYYDLWSAYSSTAYYCMDV

SEQ ID NO: 2635 - protein, 15 aa, Homo sapiens
ARLSGSGWLGYAMDV

SEQ ID NO: 2636 - protein, 10 aa, Homo sapiens
ARPSNWYFDL

SEQ ID NO: 2637 - protein, 20 aa, Homo sapiens
AKAGYYAYVWGSYRFEYFDN

SEQ ID NO: 2638 - protein, 11 aa, Homo sapiens
ARGPEPDAFDI

SEQ ID NO: 2639 - protein, 14 aa, Homo sapiens
AGSPVPPTIVGASY

SEQ ID NO: 2640 - protein, 20 aa, Homo sapiens
ARDLSTTWYLEMWGPDAFDI

SEQ ID NO: 2641 - protein, 20 aa, Homo sapiens
AKKGGPYCGGGNCYAGYFDY

SEQ ID NO: 2642 - protein, 16 aa, Homo sapiens
ARVGYSQGYYYYYMDV

SEQ ID NO: 2643 - protein, 20 aa, Homo sapiens
ARDYCSSTTCPAETYYYMDV

SEQ ID NO: 2644 - protein, 10 aa, Homo sapiens
ARDFLRWHDL

SEQ ID NO: 2645 - protein, 14 aa, Homo sapiens
ARVDFDILTGYYSN

SEQ ID NO: 2646 - protein, 15 aa, Homo sapiens
AKWAGPIVMKYYLQY

SEQ ID NO: 2647 - protein, 17 aa, Homo sapiens
ARGGDSGYDLGAWYFDL

SEQ ID NO: 2648 - protein, 12 aa, Homo sapiens
ARTPTLYNWFHP

SEQ ID NO: 2649 - protein, 12 aa, Homo sapiens
ARATTFFYGMDV

SEQ ID NO: 2650 - protein, 17 aa, Homo sapiens
ARHQRYCSSSSCHVWDY

SEQ ID NO: 2651 - protein, 14 aa, Homo sapiens
AKGRGAGYTSYMDV

SEQ ID NO: 2652 - protein, 16 aa, Homo sapiens
ARSYDILTGYRDAFDI

SEQ ID NO: 2653 - protein, 22 aa, Homo sapiens
ARDDNSPQGSGWYFYYYYAMDV

SEQ ID NO: 2654 - protein, 17 aa, Homo sapiens
ARDWAPTYYDMPSAFDI

SEQ ID NO: 2655 - protein, 12 aa, Homo sapiens
VRLGVSSWYFDY

SEQ ID NO: 2656 - protein, 26 aa, Homo sapiens
ARVVVEVATNKGIHGVDYYYYYYMDV

SEQ ID NO: 2657 - protein, 15 aa, Homo sapiens
ARLRYSSSGGHIFDY

SEQ ID NO: 2658 - protein, 18 aa, Homo sapiens
ARGLTGSSAYKDEIYFDY

SEQ ID NO: 2659 - protein, 21 aa, Homo sapiens
ARDGGNAYSSGWYRYYYHMDV

SEQ ID NO: 2660 - protein, 16 aa, Homo sapiens
ARVLYDSSGFYNWFDP

SEQ ID NO: 2661 - protein, 16 aa, Homo sapiens
ARGFHVPAALRNWFDP

SEQ ID NO: 2662 - protein, 16 aa, Homo sapiens
ARSYDILTGYRDAFDI

SEQ ID NO: 2663 - protein, 17 aa, Homo sapiens
ARVNDGRPNPLEYYFDY

SEQ ID NO: 2664 - protein, 16 aa, Homo sapiens
ARETYSAYEMPPYFDY

SEQ ID NO: 2665 - protein, 21 aa, Homo sapiens
ARDLIIESTIAARPGYYGMDV

SEQ ID NO: 2666 - protein, 12 aa, Homo sapiens
ARERSGTYFFDY

SEQ ID NO: 2667 - protein, 11 aa, Homo sapiens
ARETPVTAIDY

SEQ ID NO: 2668 - protein, 16 aa, Homo sapiens
AAPYCSSISCNDGFDI

SEQ ID NO: 2669 - protein, 16 aa, Homo sapiens
ASMTRMSEQTYYGMDV

SEQ ID NO: 2670 - protein, 8 aa, Homo sapiens
ARELMSVG

SEQ ID NO: 2671 - protein, 17 aa, Homo sapiens
ARDALYYNGPGRDGMDV

SEQ ID NO: 2672 - protein, 17 aa, Homo sapiens
ARDALYYNGPGRDGMDV

SEQ ID NO: 2673 - protein, 19 aa, Homo sapiens
AKDMVEPLFSHYYYYGMDV

SEQ ID NO: 2674 - protein, 17 aa, Homo sapiens
ARAPRERLQWGEYYFDY

SEQ ID NO: 2675 - protein, 22 aa, Homo sapiens
ARVFETKVIRGGRYYYYYYMDV

SEQ ID NO: 2676 - protein, 16 aa, Homo sapiens
ARCRQMGNFYYYYMDV

SEQ ID NO: 2677 - protein, 15 aa, Homo sapiens
ARVVPTRGPVAWFDP

SEQ ID NO: 2678 - protein, 21 aa, Homo sapiens
ARDQSQGAYILTGYRGYGMDV

SEQ ID NO: 2679 - protein, 17 aa, Homo sapiens
TTTQGGDYGDNLYYLDY

SEQ ID NO: 2680 - protein, 11 aa, Homo sapiens
ARGPEPDAFDI

SEQ ID NO: 2681 - protein, 16 aa, Homo sapiens
ARGYGFVPNVLYYFDY

SEQ ID NO: 2682 - protein, 13 aa, Homo sapiens
ARGGSILWWLIDY

SEQ ID NO: 2683 - protein, 16 aa, Homo sapiens
AKDSRSGIAGVDAFDI

SEQ ID NO: 2684 - protein, 13 aa, Homo sapiens
ARGDGGYYSPFDY

SEQ ID NO: 2685 - protein, 19 aa, Homo sapiens
AHRLPTPQLLPSFENWFDP

SEQ ID NO: 2686 - protein, 10 aa, Homo sapiens
AREVVGYFDC

SEQ ID NO: 2687 - protein, 12 aa, Homo sapiens
ARLRWLRGGIDF

SEQ ID NO: 2688 - protein, 16 aa, Homo sapiens
ARGYGFVPNVLYYFDY

SEQ ID NO: 2689 - protein, 14 aa, Homo sapiens
ARAQGGNYYYGMDV

SEQ ID NO: 2690 - protein, 25 aa, Homo sapiens
ARDLAYHPYRDYGDDDYYYYYGMDV

SEQ ID NO: 2691 - protein, 15 aa, Homo sapiens
ARGAIPPNSRAEIDY

SEQ ID NO: 2692 - protein, 21 aa, Homo sapiens
ARENDYGDYVEPRDYYYGMDV

SEQ ID NO: 2693 - protein, 17 aa, Homo sapiens
AREGPFGDREASGAFDV

SEQ ID NO: 2694 - protein, 13 aa, Homo sapiens
TGVVAAPAEYFQH

SEQ ID NO: 2695 - protein, 12 aa, Homo sapiens
ARLGFYYGGADY

SEQ ID NO: 2696 - protein, 11 aa, Homo sapiens
AKDGSIAAADY

SEQ ID NO: 2697 - protein, 14 aa, Homo sapiens
ARGAAVPAAGEFDY

SEQ ID NO: 2698 - protein, 14 aa, Homo sapiens
AKGDGSYLMDYFDY

SEQ ID NO: 2699 - protein, 16 aa, Homo sapiens
ARSYDILTGYRDAFDI

SEQ ID NO: 2700 - protein, 16 aa, Homo sapiens
ARCRQMGNFYYYYMDV

SEQ ID NO: 2701 - protein, 18 aa, Homo sapiens
ARLGSESKIDYYYYGMDV

SEQ ID NO: 2702 - protein, 17 aa, Homo sapiens
ARGRGYSNYGASYYMDV

SEQ ID NO: 2703 - protein, 15 aa, Homo sapiens
ARMSRGYNYAYTFDI

SEQ ID NO: 2704 - protein, 12 aa, Homo sapiens
ARTMATINAFDI

SEQ ID NO: 2705 - protein, 10 aa, Homo sapiens
ARGGATNFDY

SEQ ID NO: 2706 - protein, 11 aa, Homo sapiens
ARPGKAAAFDY

SEQ ID NO: 2707 - protein, 21 aa, Homo sapiens
ARDLHQDWVVVVAANVYGMDV

SEQ ID NO: 2708 - protein, 16 aa, Homo sapiens
AAPYCSSISCNDGFDI

SEQ ID NO: 2709 - protein, 12 aa, Homo sapiens
ARATTFFYGMDV

SEQ ID NO: 2710 - protein, 20 aa, Homo sapiens
AKKGGPYCGGGNCYAGYFDY

SEQ ID NO: 2711 - protein, 20 aa, Homo sapiens
AKLDVGGYDFVSGHYYAFDI

SEQ ID NO: 2712 - protein, 21 aa, Homo sapiens
ARGLISLFRGAIFHYYYGMDV

SEQ ID NO: 2713 - protein, 11 aa, Homo sapiens
ARDLVTYGLDV

SEQ ID NO: 2714 - protein, 19 aa, Homo sapiens
AHSGPPDLSPVLSQGWFDP

SEQ ID NO: 2715 - protein, 22 aa, Homo sapiens
AKGGPNKEVLYFGELLDYGMDV

SEQ ID NO: 2716 - protein, 10 aa, Homo sapiens
ARVQRRRLDY

SEQ ID NO: 2717 - protein, 16 aa, Homo sapiens
AAPYCSSISCNDGFDI

SEQ ID NO: 2718 - protein, 15 aa, Homo sapiens
ARGAIPPNSRAEIDY

SEQ ID NO: 2719 - protein, 20 aa, Homo sapiens
ARDLSTTWYLEMWGPDAFDI

SEQ ID NO: 2720 - protein, 16 aa, Homo sapiens
ARVLYDSSGFYNWFDP

SEQ ID NO: 2721 - protein, 20 aa, Homo sapiens
AKNLGPYCSGGTCYSLVGDY

SEQ ID NO: 2722 - protein, 16 aa, Homo sapiens
AAPYCSSISCNDGFDI

SEQ ID NO: 2723 - protein, 20 aa, Homo sapiens
AKDEMAYPPSHHYYYYYMDV

SEQ ID NO: 2724 - protein, 23 aa, Homo sapiens
ARLVTTVTTANGLYYYSYYYMDV

SEQ ID NO: 2725 - protein, 14 aa, Homo sapiens
ARDRSGNYRDAFDI

SEQ ID NO: 2726 - protein, 14 aa, Homo sapiens
ARVSSGYYFTPFDY

SEQ ID NO: 2727 - protein, 14 aa, Homo sapiens
ARARGGSYNDAFDI

SEQ ID NO: 2728 - protein, 28 aa, Homo sapiens
AKDGQYYDFWSGYLGARTNPHYYYYMDV

SEQ ID NO: 2729 - protein, 17 aa, Homo sapiens
AKDMGEAVAGTHYGMDV

SEQ ID NO: 2730 - protein, 15 aa, Homo sapiens
ARVGAYDSSGYSNDY

SEQ ID NO: 2731 - protein, 14 aa, Homo sapiens
AREDYYDSSGSFDY

SEQ ID NO: 2732 - protein, 16 aa, Homo sapiens
ARHSQGWLQQAVAFDI

SEQ ID NO: 2733 - protein, 21 aa, Homo sapiens
ARGGYYYDPSGYYSRSFSFDY

SEQ ID NO: 2734 - protein, 15 aa, Homo sapiens
ARDLVWATVSGTMDV

SEQ ID NO: 2735 - protein, 22 aa, Homo sapiens
ARPPRNYYDRSGYYQRAEYFQH

SEQ ID NO: 2736 - protein, 12 aa, Homo sapiens
ARVEWAAAGTFY

SEQ ID NO: 2737 - protein, 20 aa, Homo sapiens
ARWKSDYYDSSGYYPAAFDI

SEQ ID NO: 2738 - protein, 22 aa, Homo sapiens
AGDQNLYCSGDSCYYHYYGMDV

SEQ ID NO: 2739 - protein, 26 aa, Homo sapiens
ARDSEYYDILTGYLAPTHYYYYYMDV

SEQ ID NO: 2740 - protein, 20 aa, Homo sapiens
ARDLVDTAMVQTLDDYGMDV

SEQ ID NO: 2741 - protein, 15 aa, Homo sapiens
ARYYYDSRGYTSIDF

SEQ ID NO: 2742 - protein, 21 aa, Homo sapiens
ARLNYDFWSGYYSYALYYMDV

SEQ ID NO: 2743 - protein, 16 aa, Homo sapiens
ARQQLDYYDSSGCFDY

SEQ ID NO: 2744 - protein, 13 aa, Homo sapiens
ARAMGSYRSPFDY

SEQ ID NO: 2745 - protein, 14 aa, Homo sapiens
ARGGDRYPVGYFDL

SEQ ID NO: 2746 - protein, 15 aa, Homo sapiens
ARRSTSRWGYYYMDV

SEQ ID NO: 2747 - protein, 18 aa, Homo sapiens
AREANSDFWSGYLGYFDY

SEQ ID NO: 2748 - protein, 12 aa, Homo sapiens
ARDLERAGGMDV

SEQ ID NO: 2749 - protein, 20 aa, Homo sapiens
ARHMRPSIAARPGYQYYMDV

SEQ ID NO: 2750 - protein, 9 aa, Homo sapiens
AREAYGMDV

SEQ ID NO: 2751 - protein, 18 aa, Homo sapiens
AKGLRGQQLVIPTEYFQH

SEQ ID NO: 2752 - protein, 19 aa, Homo sapiens
ARGPRGCSSTSCYGSYFDY

SEQ ID NO: 2753 - protein, 20 aa, Homo sapiens
ARDQPLPDILTGYYTGPLDY

SEQ ID NO: 2754 - protein, 12 aa, Homo sapiens
ARDLDTMGGMDV

SEQ ID NO: 2755 - protein, 15 aa, Homo sapiens
ARVRYYDSSGYYEDY

SEQ ID NO: 2756 - protein, 22 aa, Homo sapiens
AKDTGYCGDDCYIKLIRGGPDY

SEQ ID NO: 2757 - protein, 16 aa, Homo sapiens
ASSDSSGFVGSRGFDY

SEQ ID NO: 2758 - protein, 13 aa, Homo sapiens
ASFGDDSGDEGVR

SEQ ID NO: 2759 - protein, 15 aa, Homo sapiens
ARVYSYDSSGYYLEY

SEQ ID NO: 2760 - protein, 17 aa, Homo sapiens
ASPLLLTPPDYYYYMDV

SEQ ID NO: 2761 - protein, 20 aa, Homo sapiens
ARGPRYCSSTSCYAGVYFDY

SEQ ID NO: 2762 - protein, 20 aa, Homo sapiens
ARDGFGDVEEMATIKDAFDI

SEQ ID NO: 2763 - protein, 20 aa, Homo sapiens
ARPNPAGGYDSSGWVDAFDI

SEQ ID NO: 2764 - protein, 16 aa, Homo sapiens
ATGPTIAAAATNWFDP

SEQ ID NO: 2765 - protein, 16 aa, Homo sapiens
TTDRGDSYGYYYCMDV

SEQ ID NO: 2766 - protein, 17 aa, Homo sapiens
AKDKAPPCSSGWYYFDY

SEQ ID NO: 2767 - protein, 20 aa, Homo sapiens
ARGVEDPVVPAAIPWCWFDP

SEQ ID NO: 2768 - protein, 18 aa, Homo sapiens
ASLPVVPAAIGPLPAFDI

SEQ ID NO: 2769 - protein, 23 aa, Homo sapiens
RKMLTIFGKVNQTMLLISGAKGQ

SEQ ID NO: 2770 - protein, 15 aa, Homo sapiens
ARTHSYDNSGQYFDY

SEQ ID NO: 2771 - protein, 20 aa, Homo sapiens
ARLKVITIFGVVRDDYGMDV

SEQ ID NO: 2772 - protein, 14 aa, Homo sapiens
ARSASGSYYGAFDY

SEQ ID NO: 2773 - protein, 14 aa, Homo sapiens
ATSPAVMSVGWVDP

SEQ ID NO: 2774 - protein, 15 aa, Homo sapiens
ARQVRQWLEDDAFDI

SEQ ID NO: 2775 - protein, 17 aa, Homo sapiens
ARAHVDTAMVESGAFDI

SEQ ID NO: 2776 - protein, 15 aa, Homo sapiens
AGRYCSGGRCGWFDP

SEQ ID NO: 2777 - protein, 24 aa, Homo sapiens
ARVQKDIVVVPVALADYYYYGMDV

SEQ ID NO: 2778 - protein, 19 aa, Homo sapiens
ARFDYGYPYSSWSVLSIDY

SEQ ID NO: 2779 - protein, 15 aa, Homo sapiens
AREGSRQWLVIYFDY

SEQ ID NO: 2780 - protein, 24 aa, Homo sapiens
ARGDGDYYDSSGYYRPTLYNWLDP

SEQ ID NO: 2781 - protein, 12 aa, Homo sapiens
ARHPSGLYQLLN

SEQ ID NO: 2782 - protein, 21 aa, Homo sapiens
AKVATYYYDRSGYYYGGALDY

SEQ ID NO: 2783 - protein, 14 aa, Homo sapiens
ARGPAATYYYYMDV

SEQ ID NO: 2784 - protein, 12 aa, Homo sapiens
AKEIAVAGCFDY

SEQ ID NO: 2785 - protein, 22 aa, Homo sapiens
ARVGSVKSTAGYDFWSGDPFDY

SEQ ID NO: 2786 - protein, 16 aa, Homo sapiens
ATAYSVDTAMVRGVGY

SEQ ID NO: 2787 - protein, 18 aa, Homo sapiens
ARDAPDYYDSSGPTYFDY

SEQ ID NO: 2788 - protein, 20 aa, Homo sapiens
AKMGPDPAHDYGRKNDAFDI

SEQ ID NO: 2789 - protein, 16 aa, Homo sapiens
AKAEPEVGGYDYYMDV

SEQ ID NO: 2790 - protein, 14 aa, Homo sapiens
ARGPAATYYYYMDV

SEQ ID NO: 2791 - protein, 16 aa, Homo sapiens
ARRGYTYGADFYGLDV

SEQ ID NO: 2792 - protein, 12 aa, Homo sapiens
AGGSGISTPMDV

SEQ ID NO: 2793 - protein, 11 aa, Homo sapiens
ARDLSEGGMDV

SEQ ID NO: 2794 - protein, 18 aa, Homo sapiens
ATRKETTVTTSLVYGMDV

SEQ ID NO: 2795 - protein, 17 aa, Homo sapiens
AREVMVRGALPPYGMDV

SEQ ID NO: 2796 - protein, 18 aa, Homo sapiens
ARGPFYYDNSGTLGGLDV

SEQ ID NO: 2797 - protein, 12 aa, Homo sapiens
ARDGVIPPRFDY

SEQ ID NO: 2798 - protein, 18 aa, Homo sapiens
ARGPYYYDSSGSLGAFDI

SEQ ID NO: 2799 - protein, 15 aa, Homo sapiens
AGSDNYGFPYNGMDV

SEQ ID NO: 2800 - protein, 15 aa, Homo sapiens
ARDSRFSYVNGEFDY

SEQ ID NO: 2801 - protein, 22 aa, Homo sapiens
ARVGWYDFGTPGDYYYYYGMDV

SEQ ID NO: 2802 - protein, 22 aa, Homo sapiens
ARVFGPGLDCSSTSCYTYGMDV

SEQ ID NO: 2803 - protein, 18 aa, Homo sapiens
VRGPFYYDSSGPLGGMDV

SEQ ID NO: 2804 - protein, 16 aa, Homo sapiens
AAPYCSSTNCYDAFDI

SEQ ID NO: 2805 - protein, 18 aa, Homo sapiens
AKDFLWDLHPPRYYGMDV

SEQ ID NO: 2806 - protein, 17 aa, Homo sapiens
ARTPLSLRLRYNWYFDL

SEQ ID NO: 2807 - protein, 6 aa, Homo sapiens
ARGFDY

SEQ ID NO: 2808 - protein, 10 aa, Homo sapiens
ARETTGHFDY

SEQ ID NO: 2809 - protein, 13 aa, Homo sapiens
VRGGVSGPNSFDM

SEQ ID NO: 2810 - protein, 15 aa, Homo sapiens
ARASARPGVATNLDF

SEQ ID NO: 2811 - protein, 19 aa, Homo sapiens
ARDFNSYQLLWYYYYGMDV

SEQ ID NO: 2812 - protein, 18 aa, Homo sapiens
ARQSSFYSSGWYSYGMDV

SEQ ID NO: 2813 - protein, 17 aa, Homo sapiens
ARVDYGSGSYGWGWFDP

SEQ ID NO: 2814 - protein, 15 aa, Homo sapiens
ATTSPIVGAITWFDP

SEQ ID NO: 2815 - protein, 20 aa, Homo sapiens
AREYYYDSSVYPYYYYAMDV

SEQ ID NO: 2816 - protein, 12 aa, Homo sapiens
ARVRGSYYLFDY

SEQ ID NO: 2817 - protein, 18 aa, Homo sapiens
TTDRVYDYIWGSYRYLDY

SEQ ID NO: 2818 - protein, 21 aa, Homo sapiens
ARDRESYDILTGYSMEGCFDY

SEQ ID NO: 2819 - protein, 19 aa, Homo sapiens
ARVWGYCSGGSCYVDAFDI

SEQ ID NO: 2820 - protein, 15 aa, Homo sapiens
ATAPPYSPPSSWFDP

SEQ ID NO: 2821 - protein, 22 aa, Homo sapiens
ARDHHYDFWSGYSSYYYYGMDV

SEQ ID NO: 2822 - protein, 27 aa, Homo sapiens
ARDEAYYDILTGYINAPKNYYYYGMDV

SEQ ID NO: 2823 - protein, 14 aa, Homo sapiens
ARSFGGSYYYGMDV

SEQ ID NO: 2824 - protein, 15 aa, Homo sapiens
ARASARPGVATNLDF

SEQ ID NO: 2825 - protein, 12 aa, Homo sapiens
ARDLDVSGGMDV

SEQ ID NO: 2826 - protein, 15 aa, Homo sapiens
ATAPPYSPPSSWFDP

SEQ ID NO: 2827 - protein, 15 aa, Homo sapiens
AREARDYYGSGSLDY

SEQ ID NO: 2828 - protein, 16 aa, Homo sapiens
ARDSVAGIYYYYGMDV

SEQ ID NO: 2829 - protein, 14 aa, Homo sapiens
ARSYGGSYYYGMDV

SEQ ID NO: 2830 - protein, 17 aa, Homo sapiens
ARTPLSLRLRYNWYFDL

SEQ ID NO: 2831 - protein, 18 aa, Homo sapiens
ARDLTTTAGTDYYYGMDV

SEQ ID NO: 2832 - protein, 21 aa, Homo sapiens
ARARVAYDYIWGSYRYKAFDY

SEQ ID NO: 2833 - protein, 14 aa, Homo sapiens
ARAQTAHYSSSFDY

SEQ ID NO: 2834 - protein, 13 aa, Homo sapiens
ARGGRLADAAGDY

SEQ ID NO: 2835 - protein, 10 aa, Homo sapiens
ARGHYDLFDY

SEQ ID NO: 2836 - protein, 16 aa, Homo sapiens
ARIRGVYSSGWIGGDY

SEQ ID NO: 2837 - protein, 15 aa, Homo sapiens
ARGDGWDNYYYGMDV

SEQ ID NO: 2838 - protein, 11 aa, Homo sapiens
ARGFGDYYFDY

SEQ ID NO: 2839 - protein, 13 aa, Homo sapiens
VRGGVSGPNAFDI

SEQ ID NO: 2840 - protein, 14 aa, Homo sapiens
ARSISGSYLGAFDY

SEQ ID NO: 2841 - protein, 16 aa, Homo sapiens
ARVGLWWLGHPDAFDI

SEQ ID NO: 2842 - protein, 14 aa, Homo sapiens
ARTKGGSYFAPFDY

SEQ ID NO: 2843 - protein, 15 aa, Homo sapiens
ARDRGYAATFGVFDY

SEQ ID NO: 2844 - protein, 10 aa, Homo sapiens
ARVTVVHFDY

SEQ ID NO: 2845 - protein, 20 aa, Homo sapiens
ARDLTSTSSSPYSYYYGMDV

SEQ ID NO: 2846 - protein, 22 aa, Homo sapiens
ARVTVEAIFGVVILPLKNWFDP

SEQ ID NO: 2847 - protein, 13 aa, Homo sapiens
VRGGVSGPNSFDM

SEQ ID NO: 2848 - protein, 16 aa, Homo sapiens
ARVGLWWLGHPDVFDI

SEQ ID NO: 2849 - protein, 18 aa, Homo sapiens
ARDLVEDTAMVTGAAAGT

SEQ ID NO: 2850 - protein, 17 aa, Homo sapiens
ARAGRRYSSSDDGAFDI

SEQ ID NO: 2851 - protein, 17 aa, Homo sapiens
ARDIMFGDDWLQKQPDY

SEQ ID NO: 2852 - protein, 14 aa, Homo sapiens
ARSISGSYLGAFDY

SEQ ID NO: 2853 - protein, 25 aa, Homo sapiens
ARLVPTWASYYDFWSGYPGGYGMDV

SEQ ID NO: 2854 - protein, 17 aa, Homo sapiens
ATHIVVVTATPNWYFDL

SEQ ID NO: 2855 - protein, 14 aa, Homo sapiens
AKDGGKLWVYYFDY

SEQ ID NO: 2856 - protein, 15 aa, Homo sapiens
ARDRSWAVVYYYMDV

SEQ ID NO: 2857 - protein, 31 aa, Homo sapiens
ARATTDCSSTSCWSLDFWSGYYTGGREKIFD

SEQ ID NO: 2858 - protein, 11 aa, Homo sapiens
ARSLRGANLVP

SEQ ID NO: 2859 - protein, 11 aa, Homo sapiens
ARSLRGANLVP

SEQ ID NO: 2860 - protein, 20 aa, Lama pocos
ARTENVRSLLSDYATWPYDY

SEQ ID NO: 2861 - protein, 20 aa, Lama pocos
AQTHYVSYLLSDYATWPYDY

SEQ ID NO: 2862 - protein, 19 aa, Homo sapiens
ARVPYCSSTSCHRDWYFDL

SEQ ID NO: 2863 - protein, 19 aa, Homo sapiens
ARAARRPVVTDTMAYYMDV

SEQ ID NO: 2864 - protein, 16 aa, Homo sapiens
AAPHCSSTICYDGFDI

SEQ ID NO: 2865 - protein, 13 aa, Homo sapiens
AKGGDYEWELLES

SEQ ID NO: 2866 - protein, 11 aa, Homo sapiens
ARDFGDFFFDY

SEQ ID NO: 2867 - protein, 11 aa, Homo sapiens
ARDYGDYFFDY

SEQ ID NO: 2868 - protein, 16 aa, Homo sapiens
AAPYCSSTRCYDAFDI

SEQ ID NO: 2869 - protein, 18 aa, Homo sapiens
AKDINYDSGGYHKNYFDY

SEQ ID NO: 2870 - protein, 18 aa, Lama pocos
AAAEWGYEWPLYYASSWY

SEQ ID NO: 2871 - protein, 18 aa, Lama pocos
AAAYWGWDWPLNSQDYWY

SEQ ID NO: 2872 - protein, 18 aa, Lama pocos
AAADWGYNWPLIREEYEY

SEQ ID NO: 2873 - protein, 18 aa, Lama pocos
AAADWGYNIPLNITDYWY

SEQ ID NO: 2874 - protein, 18 aa, Lama pocos
AAAMNGYNEPLYSYDYEY

SEQ ID NO: 2875 - protein, 18 aa, Lama pocos
AAASWGYEWPLVYDDYWY

SEQ ID NO: 2876 - protein, 18 aa, Lama pocos
AAATWGYHWPLGAWDYWY

SEQ ID NO: 2877 - protein, 18 aa, Lama pocos
AAATWGYSWPLEHDEYWY

SEQ ID NO: 2878 - protein, 18 aa, Lama pocos
AAAFHGEQYPLYTNKYHY

SEQ ID NO: 2879 - protein, 18 aa, Lama pocos
AAANYGANFPLQANTYFY

SEQ ID NO: 2880 - protein, 17 aa, Homo sapiens
ARDFSGHTAVAGTGFEY

SEQ ID NO: 2881 - protein, 17 aa, Homo sapiens
VRASPPGGNTGWPFFED

SEQ ID NO: 2882 - protein, 16 aa, Homo sapiens
ARDNALQNAQIGYLDY

SEQ ID NO: 2883 - protein, 22 aa, Homo sapiens
VLDSDPYTATFSHNHYWYAMDV

SEQ ID NO: 2884 - protein, 19 aa, Homo sapiens
ARDPSIHYTGNHHWYDLDI

SEQ ID NO: 2885 - protein, 17 aa, Homo sapiens
AREEHYDFSSGYFRPAY

SEQ ID NO: 2886 - protein, 23 aa, Homo sapiens
ARGMTSPVVHLYSSGRPSRWFDF

SEQ ID NO: 2887 - protein, 21 aa, Homo sapiens
ARSFISFDSSGHPYYYYAMDV

SEQ ID NO: 2888 - protein, 16 aa, Homo sapiens
ARDNALQNAQIGYLDY

SEQ ID NO: 2889 - protein, 19 aa, Homo sapiens
ARDPSILNTGNHHWYDLDM

SEQ ID NO: 2890 - protein, 19 aa, Homo sapiens
ARDPTFLNSGNHFWYDVDI

SEQ ID NO: 2891 - protein, 19 aa, Homo sapiens
ARDASFPNTGNHFWYDFDL

SEQ ID NO: 2892 - protein, 19 aa, Homo sapiens
AKKGSPYCGVDCYKGYFDY

SEQ ID NO: 2893 - protein, 9 aa, Homo sapiens
ARVGSGRVY

SEQ ID NO: 2894 - protein, 23 aa, Homo sapiens
ARVRIGASHHNFWSGYYTDAFDI

SEQ ID NO: 2895 - protein, 21 aa, Homo sapiens
ARAPLASCSGGRCPTYNRFDL

SEQ ID NO: 2896 - protein, 18 aa, Homo sapiens
ASEYFDGRSYHSFCGLDV

SEQ ID NO: 2897 - protein, 16 aa, Homo sapiens
AKGLSFYGSGSDAFDV

SEQ ID NO: 2898 - protein, 17 aa, Homo sapiens
ARDLISVIRGLGGGMDV

SEQ ID NO: 2899 - protein, 19 aa, Homo sapiens
ARGGPLPWSDLDIVGTFDY

SEQ ID NO: 2900 - protein, 18 aa, Homo sapiens
VKDQSSGDRLLYLGYFDL

SEQ ID NO: 2901 - protein, 18 aa, Homo sapiens
VKDQSSGDRLLYLGYFDL

SEQ ID NO: 2902 - protein, 20 aa, Homo sapiens
ATMWGGLCTASNCYGNPMDV

SEQ ID NO: 2903 - protein, 22 aa, Homo sapiens
VRDSDPYTATVTSNHYWYAMDV

SEQ ID NO: 2904 - protein, 22 aa, Homo sapiens
ARGQGGYDLRRVGYGLTSWFDP

SEQ ID NO: 2905 - protein, 20 aa, Homo sapiens
ARVLAGSSHEWQLTHDAFDI

SEQ ID NO: 2906 - protein, 17 aa, Homo sapiens
AKDLITVIRGLGGGMDV

SEQ ID NO: 2907 - protein, 15 aa, Homo sapiens
ARDGPYDSGGYHLNH

SEQ ID NO: 2908 - protein, 13 aa, Homo sapiens
ARMGPYGSGTFDY

SEQ ID NO: 2909 - protein, 17 aa, Homo sapiens
ARDLSTLQPDAIVNFDY

SEQ ID NO: 2910 - protein, 16 aa, Homo sapiens
ARDLYYDNGGYNYLDY

SEQ ID NO: 2911 - protein, 20 aa, Homo sapiens
VRDYCNSVSCYTYYYIGMDV

SEQ ID NO: 2912 - protein, 16 aa, Homo sapiens
ATSASSYSRYYFGLDV

SEQ ID NO: 2913 - protein, 18 aa, Homo sapiens
ARDLAKWSYGYYYSGMDV

SEQ ID NO: 2914 - protein, 17 aa, Homo sapiens
AREEYSGTVHNFFGMDV

SEQ ID NO: 2915 - protein, 18 aa, Homo sapiens
AKDGRYCSGISCRTGMDV

SEQ ID NO: 2916 - protein, 14 aa, Homo sapiens
ARGLLDYLHDAFDI

SEQ ID NO: 2917 - protein, 15 aa, Homo sapiens
ASRHLDLLPIGSFDV

SEQ ID NO: 2918 - protein, 16 aa, Homo sapiens
TRGSGMFYGSSSGMDV

SEQ ID NO: 2919 - protein, 14 aa, Homo sapiens
AIRRDYSDYRDFDY

SEQ ID NO: 2920 - protein, 15 aa, Homo sapiens
ARQSSSWYNPYYFDQ

SEQ ID NO: 2921 - protein, 14 aa, Homo sapiens
ARGLLDYLHDAFDI

SEQ ID NO: 2922 - protein, 19 aa, Homo sapiens
ARDPSILNTGNHHWYDLDL

SEQ ID NO: 2923 - protein, 14 aa, Homo sapiens
ARPRSGSYRQAIDY

SEQ ID NO: 2924 - protein, 16 aa, Homo sapiens
VRQNVAIQYYYYAMDV

SEQ ID NO: 2925 - protein, 14 aa, Homo sapiens
ARAKGGSYSNAFDY

SEQ ID NO: 2926 - protein, 19 aa, Homo sapiens
ARDPSILDTGNHHWYDLDI

SEQ ID NO: 2927 - protein, 17 aa, Homo sapiens
AREEYSGTVHNFFGMDV

SEQ ID NO: 2928 - protein, 15 aa, Homo sapiens
VRDWGSSTHYDVFDL

SEQ ID NO: 2929 - protein, 19 aa, Homo sapiens
ARDPSILNTGNHHWYDLDL

SEQ ID NO: 2930 - protein, 19 aa, Homo sapiens
ARDASIVGTGNHLWYGLDF

SEQ ID NO: 2931 - protein, 16 aa, Homo sapiens
ARDNALQDGRPGYFDS

SEQ ID NO: 2932 - protein, 16 aa, Homo sapiens
ARGHRFLEFPLNYFDP

SEQ ID NO: 2933 - protein, 16 aa, Homo sapiens
ARDNALQDGRPGYFDS

SEQ ID NO: 2934 - protein, 23 aa, Homo sapiens
ALLYGSGSYYNFVFFGWKDGSDA

SEQ ID NO: 2935 - protein, 19 aa, Homo sapiens
ARDPSILNTGNHHWYDLDL

SEQ ID NO: 2936 - protein, 19 aa, Homo sapiens
ARDPSIHYTGNHHWYDLDI

SEQ ID NO: 2937 - protein, 19 aa, Homo sapiens
ARDPSIHYTGNHHWYDLDI

SEQ ID NO: 2938 - protein, 22 aa, Homo sapiens
VRDSEPYTATRSQNHYWYDMDV

SEQ ID NO: 2939 - protein, 19 aa, Homo sapiens
ARDPSIHYTGNHHWYDLDI

SEQ ID NO: 2940 - protein, 19 aa, Homo sapiens
ARDPSIVDSGPHHWYDLDI

SEQ ID NO: 2941 - protein, 9 aa, Homo sapiens
ASGPNYFDY

SEQ ID NO: 2942 - protein, 18 aa, Homo sapiens
ARADRDYDFWSDPPLIDH

SEQ ID NO: 2943 - protein, 14 aa, Homo sapiens
ARGFGNGWSYYFDY

SEQ ID NO: 2944 - protein, 22 aa, Homo sapiens
ARDPGLEYSGNYFSYYYYAMDV

SEQ ID NO: 2945 - protein, 22 aa, Homo sapiens
VRDSDPYTATSRNNHYWYDMDV

SEQ ID NO: 2946 - protein, 19 aa, Homo sapiens
ARDPTFLNSGNHFWYAVDI

SEQ ID NO: 2947 - protein, 22 aa, Homo sapiens
VRDSDPYTATYRNNHYWYAMDV

SEQ ID NO: 2948 - protein, 13 aa, Homo sapiens
ARMGPSGSGSLDY

SEQ ID NO: 2949 - protein, 17 aa, Homo sapiens
AHTSELPPRRPYAAFDF

SEQ ID NO: 2950 - protein, 9 aa, Homo sapiens
ARDLPPLDY

SEQ ID NO: 2951 - protein, 20 aa, Homo sapiens
ARGFTFTYSDFLTGQRTFEY

SEQ ID NO: 2952 - protein, 13 aa, Homo sapiens
ARSYGGSYSTVGY

SEQ ID NO: 2953 - protein, 11 aa, Homo sapiens
SWNDVGWAFTF

SEQ ID NO: 2954 - protein, 17 aa, Homo sapiens
AAEERSGTNHNYYGLDV

SEQ ID NO: 2955 - protein, 18 aa, Homo sapiens
ARDREMAIITERSYGLDV

SEQ ID NO: 2956 - protein, 18 aa, Homo sapiens
AKDRYCSGGSCFYDAFDI

SEQ ID NO: 2957 - protein, 15 aa, Homo sapiens
AREAQSSGRAGCLDA

SEQ ID NO: 2958 - protein, 19 aa, Homo sapiens
ARDPSIHYTGNHHWYDLDI

SEQ ID NO: 2959 - protein, 22 aa, Homo sapiens
VRDSDPYTATVRSNHYWYAMDV

SEQ ID NO: 2960 - protein, 19 aa, Homo sapiens
ARDPTFLNSGNHFWYAVDI

SEQ ID NO: 2961 - protein, 19 aa, Homo sapiens
AAPAPSNHESWSGTDWFDP

SEQ ID NO: 2962 - protein, 16 aa, Homo sapiens
ARTTPRGWEQWPVLEY

SEQ ID NO: 2963 - protein, 17 aa, Homo sapiens
ARELDSETYYNYNSLDV

SEQ ID NO: 2964 - protein, 21 aa, Homo sapiens
ARVVFRHGQYDDSSGRLAFDI

SEQ ID NO: 2965 - protein, 19 aa, Homo sapiens
ARDPSIHYTGNHHWYDLDI

SEQ ID NO: 2966 - protein, 22 aa, Homo sapiens
VRDSDPYTATSRNNHYWYGMDV

SEQ ID NO: 2967 - protein, 15 aa, Homo sapiens
AREPDGIGAAGISGY

SEQ ID NO: 2968 - protein, 16 aa, Homo sapiens
AREMATSFGYYFVLDV

SEQ ID NO: 2969 - protein, 18 aa, Homo sapiens
ARGQESPIVGVTGRWFDP

SEQ ID NO: 2970 - protein, 14 aa, Homo sapiens
VRPYSGSYTNWFDL

SEQ ID NO: 2971 - protein, 19 aa, Homo sapiens
ARDPSILNTGNHHWYDLDI

SEQ ID NO: 2972 - protein, 19 aa, Homo sapiens
ARDPTFLNTGNHFWYAVDI

SEQ ID NO: 2973 - protein, 22 aa, Homo sapiens
VRDSDPYTATSRNNHYWYAMDV

SEQ ID NO: 2974 - protein, 19 aa, Homo sapiens
ARDPSFLNTGNHFWYDFDL

SEQ ID NO: 2975 - protein, 20 aa, Homo sapiens
ARGMISPRIPRTTRQRWFDT

SEQ ID NO: 2976 - protein, 21 aa, Homo sapiens
ARGKAHRNDFWSGYYPHWFDP

SEQ ID NO: 2977 - protein, 22 aa, Homo sapiens
ARDSDPYTATRRHNHYWYAMDV

SEQ ID NO: 2978 - protein, 23 aa, Homo sapiens
ARGLVVRYFDGFPSGPIIGAFDI

SEQ ID NO: 2979 - protein, 22 aa, Homo sapiens
VRDPDPYTATVRHNHYWHGMDV

SEQ ID NO: 2980 - protein, 23 aa, Homo sapiens
ARGSLSREYDFLTAPQNGPWFDS

SEQ ID NO: 2981 - protein, 21 aa, Homo sapiens
ARHSQKDIVLIPAAQSPIFDY

SEQ ID NO: 2982 - protein, 14 aa, Homo sapiens
VKDGGYYDSSGPGH

SEQ ID NO: 2983 - protein, 15 aa, Homo sapiens
ARESRSSGRAGCFDS

SEQ ID NO: 2984 - protein, 14 aa, Homo sapiens
ARAYGGNYQNHFDH

SEQ ID NO: 2985 - protein, 26 aa, Homo sapiens
ARGTISPIVGVPTPVVPRRGRSWFDP

SEQ ID NO: 2986 - protein, 22 aa, Homo sapiens
VRDSDPYTATSRNNHYWYAMDV

SEQ ID NO: 2987 - protein, 22 aa, Homo sapiens
VRDSDPYTATSSHNHYWYAMDV

SEQ ID NO: 2988 - protein, 11 aa, Homo sapiens
ARDRGSGVIDP

SEQ ID NO: 2989 - protein, 14 aa, Homo sapiens
VKDGGYYDSSGPGH

SEQ ID NO: 2990 - protein, 20 aa, Homo sapiens
ARVGWVRYFDWSKPYYYFDL

SEQ ID NO: 2991 - protein, 21 aa, Homo sapiens
AKCDLVRYFDWLGEENNWFDP

SEQ ID NO: 2992 - protein, 22 aa, Homo sapiens
VRDSDPYTATVRNNHYWYALDV

SEQ ID NO: 2993 - protein, 17 aa, Homo sapiens
ARATPPGGGTGWPYFDF

SEQ ID NO: 2994 - protein, 17 aa, Homo sapiens
AREEPSGTYHNYYGLDV

SEQ ID NO: 2995 - protein, 23 aa, Homo sapiens
AARIRGATHYDFWSGFWAGPFDI

SEQ ID NO: 2996 - protein, 19 aa, Homo sapiens
ARTQSNDFWSGYYTAAFDL

SEQ ID NO: 2997 - protein, 23 aa, Homo sapiens
ARGSLSREYDFLTAPQNGPWFDS

SEQ ID NO: 2998 - protein, 17 aa, Homo sapiens
VLDTTSANPHNWYGMDV

SEQ ID NO: 2999 - protein, 13 aa, Homo sapiens
ARMGPYGSGSFDY

SEQ ID NO: 3000 - protein, 15 aa, Homo sapiens
AGRHQELLPMGSFDM

SEQ ID NO: 3001 - protein, 19 aa, Homo sapiens
ARDPSILNTGNHHWYDLDI

SEQ ID NO: 3002 - protein, 15 aa, Homo sapiens
VRDGAYDSSGYYSTQ

SEQ ID NO: 3003 - protein, 19 aa, Homo sapiens
ARDPTFLNSGNHFWYAVDI

SEQ ID NO: 3004 - protein, 19 aa, Homo sapiens
ARDPTFLNTGNHFWYAVDI

SEQ ID NO: 3005 - protein, 20 aa, Homo sapiens
ARDFGVRYDDSRQLMKYCDS

SEQ ID NO: 3006 - protein, 19 aa, Homo sapiens
ARDPSILNTGNHHWYDLDL

SEQ ID NO: 3007 - protein, 17 aa, Homo sapiens
VVDTTMADPHNWYGLDV

SEQ ID NO: 3008 - protein, 23 aa, Homo sapiens
ARVRVGASHHNFWSGYYTDAFDI

SEQ ID NO: 3009 - protein, 19 aa, Homo sapiens
ARDPSFLNTGNHFWYDFDM

SEQ ID NO: 3010 - protein, 15 aa, Homo sapiens
VRDGAYDSSGYYSTQ

SEQ ID NO: 3011 - protein, 17 aa, Homo sapiens
ARDFPGDTAVAGTGFNY

SEQ ID NO: 3012 - protein, 19 aa, Homo sapiens
SRDLRRGYYDSNGHQQFDL

SEQ ID NO: 3013 - protein, 29 aa, Homo sapiens
ARDPGPITFFDWSPDKSRKSYYDYNGMDV

SEQ ID NO: 3014 - protein, 9 aa, Homo sapiens
ARDLPPLDY

SEQ ID NO: 3015 - protein, 22 aa, Homo sapiens
VRDSDPYTTTFSHNHYWYAMDV

SEQ ID NO: 3016 - protein, 18 aa, Homo sapiens
VKDNVILPGAIVRPQFDY

SEQ ID NO: 3017 - protein, 19 aa, Homo sapiens
ARDPSILNTGNHHWYDLDM

SEQ ID NO: 3018 - protein, 18 aa, Homo sapiens
ARDNVVQQNADNVGYFDF

SEQ ID NO: 3019 - protein, 19 aa, Homo sapiens
ARDPSILNTGNHHWYDLDL

SEQ ID NO: 3020 - protein, 22 aa, Homo sapiens
VRDSDPYTATSRNNHYWYGMDV

SEQ ID NO: 3021 - protein, 19 aa, Homo sapiens
ARDPSILNTGNHHWYDLDM

SEQ ID NO: 3022 - protein, 17 aa, Homo sapiens
AREGTSLGYYYYYAMDV

SEQ ID NO: 3023 - protein, 19 aa, Homo sapiens
ARDPSILNTGNHHWYDLDM

SEQ ID NO: 3024 - protein, 15 aa, Homo sapiens
ARGPIRHFGLDAFDI

SEQ ID NO: 3025 - protein, 22 aa, Homo sapiens
VRDSDPYTATSRNNHYWYGMDV

SEQ ID NO: 3026 - protein, 19 aa, Homo sapiens
ARDPSILNTGNHHWYDLDM

SEQ ID NO: 3027 - protein, 15 aa, Homo sapiens
VKDLGATVTYDVFDV

SEQ ID NO: 3028 - protein, 15 aa, Homo sapiens
AKERDLPGRGGYFDH

SEQ ID NO: 3029 - protein, 23 aa, Homo sapiens
ARGYTAPIIREVPITFRPRWFDP

SEQ ID NO: 3030 - protein, 13 aa, Homo sapiens
ARMGPYGSGTFDY

SEQ ID NO: 3031 - protein, 16 aa, Homo sapiens
ARDHALQNGRPGYFDS

SEQ ID NO: 3032 - protein, 14 aa, Homo sapiens
VREGQQWLGLYFDH

SEQ ID NO: 3033 - protein, 18 aa, Homo sapiens
AREKKSFGPQYYYGSGED

SEQ ID NO: 3034 - protein, 20 aa, Homo sapiens
VRQRYCSGGSCFLFEDAFEI

SEQ ID NO: 3035 - protein, 10 aa, Homo sapiens
VRDTDWAFDS

SEQ ID NO: 3036 - protein, 17 aa, Homo sapiens
AHTSELPPRRPYAAFDF

SEQ ID NO: 3037 - protein, 8 aa, Homo sapiens
ANTNFLDY

SEQ ID NO: 3038 - protein, 21 aa, Homo sapiens
TRSFISFDSSGHPYYYYAMDV

SEQ ID NO: 3039 - protein, 11 aa, Homo sapiens
TRETGTDEFDF

SEQ ID NO: 3040 - protein, 20 aa, Homo sapiens
ATMWGGLCTASNCYGNPMDV

SEQ ID NO: 3041 - protein, 20 aa, Homo sapiens
ATMWGGLCTASNCYGNPMDV

SEQ ID NO: 3042 - protein, 20 aa, Homo sapiens
ATMWGGLCTASNCYGNPMDV

SEQ ID NO: 3043 - protein, 11 aa, Homo sapiens
ARDLAWTFFDY

SEQ ID NO: 3044 - protein, 17 aa, Homo sapiens
ARATPPGGTTGWPYIDL

SEQ ID NO: 3045 - protein, 8 aa, Homo sapiens
ANTNFLDY

SEQ ID NO: 3046 - protein, 13 aa, Homo sapiens
AKLGTDHPIGVDV

SEQ ID NO: 3047 - protein, 14 aa, Homo sapiens
VKALYSSSWCPFDY

SEQ ID NO: 3048 - protein, 17 aa, Homo sapiens
ARELDSETYYNYNSLDV

SEQ ID NO: 3049 - protein, 17 aa, Homo sapiens
AKAQGIYYRGWSYWFDP

SEQ ID NO: 3050 - protein, 24 aa, Homo sapiens
AREARRQVTQWFGEFWGPYNWFDP

SEQ ID NO: 3051 - protein, 18 aa, Homo sapiens
ARGLISYTLWLRESYFDY

SEQ ID NO: 3052 - protein, 19 aa, Homo sapiens
ARDPSILNTGNHHWYDLDI

SEQ ID NO: 3053 - protein, 11 aa, Homo sapiens
ARDYGDGPPDH

SEQ ID NO: 3054 - protein, 17 aa, Homo sapiens
VLDTTMSHPHNWYGMDV

SEQ ID NO: 3055 - protein, 18 aa, Homo sapiens
ASEYFDGRSYHSFCGLDV

SEQ ID NO: 3056 - protein, 19 aa, Homo sapiens
ARDPSILNTGPHHWYDLDI

SEQ ID NO: 3057 - protein, 22 aa, Homo sapiens
VRDSEPYTATRSQNHYWYDMDV

SEQ ID NO: 3058 - protein, 19 aa, Homo sapiens
AREFGVRFLDRSLFGAMDV

SEQ ID NO: 3059 - protein, 12 aa, Homo sapiens
ARAGGYLSAFDI

SEQ ID NO: 3060 - protein, 19 aa, Homo sapiens
ARDPSFLNAGNHFYYDFDV

SEQ ID NO: 3061 - protein, 18 aa, Homo sapiens
ARAGNIVVMPAAQYYFDY

SEQ ID NO: 3062 - protein, 19 aa, Homo sapiens
VRDDVLQHSRPSGPGYFVS

SEQ ID NO: 3063 - protein, 19 aa, Homo sapiens
ARGSQIDLRGGLGATFFDY

SEQ ID NO: 3064 - protein, 22 aa, Homo sapiens
ARDSDPYTATRRHNHYWYAMDV

SEQ ID NO: 3065 - protein, 10 aa, Homo sapiens
VRDTDWAFDS

SEQ ID NO: 3066 - protein, 17 aa, Homo sapiens
ARRGNNFGYYYYYTVDV

SEQ ID NO: 3067 - protein, 20 aa, Homo sapiens
ARVLAGSSHEWQLTHDAFDI

SEQ ID NO: 3068 - protein, 20 aa, Homo sapiens
AKGDWIRYFDWSLPISFFDY

SEQ ID NO: 3069 - protein, 18 aa, Homo sapiens
ARTTSPLTYSGHWPLFDY

SEQ ID NO: 3070 - protein, 22 aa, Homo sapiens
VRDSDPYTATSRNNHYWYGMDV

SEQ ID NO: 3071 - protein, 19 aa, Homo sapiens
ARDPSILNTGNHHWYDLDI

SEQ ID NO: 3072 - protein, 19 aa, Homo sapiens
ARDPSILNTGNHHWYDLDI

SEQ ID NO: 3073 - protein, 15 aa, Homo sapiens
VRMDWMEWMKYYFDS

SEQ ID NO: 3074 - protein, 19 aa, Homo sapiens
ARDPSILNTGNHHWYDLDM

SEQ ID NO: 3075 - protein, 19 aa, Homo sapiens
VRDDVLQHSRPSGPGYFVS

SEQ ID NO: 3076 - protein, 20 aa, Homo sapiens
ATMWGGLCTASNCYGNPMDV

SEQ ID NO: 3077 - protein, 7 aa, Mus musculus
TRSAMDY

SEQ ID NO: 3078 - protein, 4 aa, Mus musculus
ALRR

SEQ ID NO: 3079 - protein, 4 aa, Mus musculus
ALRR

SEQ ID NO: 3080 - protein, 4 aa, Mus musculus
ALRR

SEQ ID NO: 3081 - protein, 13 aa, Mus musculus
ARIYDFDEDYFDV

SEQ ID NO: 3082 - protein, 15 aa, Homo sapiens
VKDQDSSSWYDAFDI

SEQ ID NO: 3083 - protein, 15 aa, Homo sapiens
VKDQDSSSWYDAFDI

SEQ ID NO: 3084 - protein, 12 aa, Homo sapiens
ARDLSVRGGMDV

SEQ ID NO: 3085 - protein, 15 aa, Homo sapiens
AKDLVTAPSYEAFDI

SEQ ID NO: 3086 - protein, 11 aa, Homo sapiens
ARDLQYYGMDV

SEQ ID NO: 3087 - protein, 15 aa, Homo sapiens
VKDQDSNSWYDAFDI

SEQ ID NO: 3088 - protein, 12 aa, Homo sapiens
ARDLAVAGAFDI

SEQ ID NO: 3089 - protein, 12 aa, Homo sapiens
ARDLSVRGGMDV

SEQ ID NO: 3090 - protein, 13 aa, Homo sapiens
ALASGSYFGGANY

SEQ ID NO: 3091 - protein, 13 aa, Homo sapiens
ATGARFGESPFDY

SEQ ID NO: 3092 - protein, 13 aa, Homo sapiens
ATGARFGESPFDY

SEQ ID NO: 3093 - protein, 23 aa, Homo sapiens
AREGGLDYFGSRNSGWTYTWFDP

SEQ ID NO: 3094 - protein, 20 aa, Homo sapiens
ARGVNYYDRNGYYRNDGFDI

SEQ ID NO: 3095 - protein, 15 aa, Homo sapiens
ASSKGFCSGGSCSDY

SEQ ID NO: 3096 - protein, 17 aa, Homo sapiens
AKDLRRQDYYADWYFDL

SEQ ID NO: 3097 - protein, 20 aa, Homo sapiens
ARGVNYYDRNGYYRNDGFDI

SEQ ID NO: 3098 - protein, 17 aa, Homo sapiens
AKDLRRQDYYADWYFDL

SEQ ID NO: 3099 - protein, 20 aa, Homo sapiens
ARGVNYYDRNGYYRNDGFDI

SEQ ID NO: 3100 - protein, 11 aa, Homo sapiens
AKIGSRNSLGV

SEQ ID NO: 3101 - protein, 16 aa, Homo sapiens
AAPRCSGGSCYDGFDI

SEQ ID NO: 3102 - protein, 14 aa, Lama pocos
NVKDEGATTKVYDY

SEQ ID NO: 3103 - protein, 14 aa, Lama pocos
NVKDWGAANKYYDY

SEQ ID NO: 3104 - protein, 14 aa, Lama pocos
NVKDDGQLAYHYDY

SEQ ID NO: 3105 - protein, 14 aa, Lama pocos
NVKDDGQLAYHYDY

SEQ ID NO: 3106 - protein, 14 aa, Lama pocos
NVWDDGQLAYHYDY

SEQ ID NO: 3107 - protein, 14 aa, Lama pocos
NVYDDGQLAYHYDY

SEQ ID NO: 3108 - protein, 14 aa, Lama pocos
NVKDYGWYNSQYDY

SEQ ID NO: 3109 - protein, 14 aa, Lama pocos
NVKDYGAASWEYDY

SEQ ID NO: 3110 - protein, 14 aa, Lama pocos
NVKDFGGHQAYYDY

SEQ ID NO: 3111 - protein, 14 aa, Lama pocos
NVKDEGDTSASYDY

SEQ ID NO: 3112 - protein, 14 aa, Lama pocos
NVKDEGYFSDEYDY

SEQ ID NO: 3113 - protein, 14 aa, Lama pocos
NVKDWGSSNQYYDY

SEQ ID NO: 3114 - protein, 23 aa, Lama pocos
AAVPSTYYNGSYYYTCHPGGMDY

SEQ ID NO: 3115 - protein, 23 aa, Lama pocos
AAVPSTYYSGTYYYNCHPGGMDY

SEQ ID NO: 3116 - protein, 23 aa, Lama pocos
ATAPGTYYKGSYYPMCHYYGMDY

SEQ ID NO: 3117 - protein, 23 aa, Lama pocos
ATRPLTYYSGSYYTTCSDYGMDY

SEQ ID NO: 3118 - protein, 23 aa, Lama pocos
AAVPSTYYSGSYYYTCHPGGMDY

SEQ ID NO: 3119 - protein, 23 aa, Lama pocos
AAVPSTYYSGSYYYTCHPGGMDY

SEQ ID NO: 3120 - protein, 23 aa, Lama pocos
AAVPSTYYSGSYYYTCHPGGMDY

SEQ ID NO: 3121 - protein, 23 aa, Lama pocos
AAVPSTYYSGSYYYTCHPGGMDY

SEQ ID NO: 3122 - protein, 23 aa, Lama pocos
ASFPSTYYSGSYYYTCHPGGMDY

SEQ ID NO: 3123 - protein, 23 aa, Lama pocos
AAVPSTYYSGTYYYNCHPGAMHY

SEQ ID NO: 3124 - protein, 23 aa, Lama pocos
AAVPSTYYSGTYYYNCHPGAMHY

SEQ ID NO: 3125 - protein, 23 aa, Lama pocos
AAVPSTYYSGTYYYTCHPGGMDY

SEQ ID NO: 3126 - protein, 23 aa, Lama pocos
AAVPSTYYSGTYYYTCHPGGMDY

SEQ ID NO: 3127 - protein, 20 aa, Homo sapiens
ARAVVGIVVVPAAGRRAFDI

SEQ ID NO: 3128 - protein, 18 aa, Homo sapiens
AKDRFQFARSWYGDYFDY

SEQ ID NO: 3129 - protein, 17 aa, Homo sapiens
ARINTAAYDYDSTTFDI

SEQ ID NO: 3130 - protein, 17 aa, Homo sapiens
ARERDDIFPMGLNAFDI

SEQ ID NO: 3131 - protein, 14 aa, Homo sapiens
ARGDSSGYYYYFDY

SEQ ID NO: 3132 - protein, 16 aa, Homo sapiens
ASDYFDSSGYYHSFDY

SEQ ID NO: 3133 - protein, 20 aa, Homo sapiens
ARDYTRGAWFGESLIGGFDN

SEQ ID NO: 3134 - protein, 19 aa, Homo sapiens
ATRTYDSSGYRPYYYGLDV

SEQ ID NO: 3135 - protein, 17 aa, Homo sapiens
ARDLWWNDQAHYYGMDV

SEQ ID NO: 3136 - protein, 8 aa, Lama pocos
RVFVGWHY

SEQ ID NO: 3137 - protein, 8 aa, Lama pocos
TVYVGYEY

SEQ ID NO: 3138 - protein, 8 aa, Lama pocos
EVEVGKWY

SEQ ID NO: 3139 - protein, 8 aa, Lama pocos
YVWVGQEY

SEQ ID NO: 3140 - protein, 8 aa, Lama pocos
WVIVGEYY

SEQ ID NO: 3141 - protein, 8 aa, Lama pocos
YVYVGSSY

SEQ ID NO: 3142 - protein, 8 aa, Lama pocos
FVYVGRSY

SEQ ID NO: 3143 - protein, 8 aa, Lama pocos
IVWVGAQY

SEQ ID NO: 3144 - protein, 8 aa, Lama pocos
HVWVGSLY

SEQ ID NO: 3145 - protein, 8 aa, Lama pocos
YVYVGASY

SEQ ID NO: 3146 - protein, 8 aa, Lama pocos
YVYVGSSY

SEQ ID NO: 3147 - protein, 9 aa, Lama pocos
RAVYVGMHY

SEQ ID NO: 3148 - protein, 8 aa, Lama pocos
YVYVGKSY

SEQ ID NO: 3149 - protein, 8 aa, Lama pocos
FVGVGTHY

SEQ ID NO: 3150 - protein, 8 aa, Lama pocos
FVYVGKSY

SEQ ID NO: 3151 - protein, 8 aa, Lama pocos
FVYVGKSY

SEQ ID NO: 3152 - protein, 14 aa, Lama pocos
NVKDFGTHHYAYDY

SEQ ID NO: 3153 - protein, 14 aa, Lama pocos
NVKDKGMAVQWYDY

SEQ ID NO: 3154 - protein, 14 aa, Lama pocos
NVKDEGDMFTAYDY

SEQ ID NO: 3155 - protein, 14 aa, Lama pocos
NVKDSGQWRQEYDY

SEQ ID NO: 3156 - protein, 14 aa, Lama pocos
NVKDFGYTWHEYDY

SEQ ID NO: 3157 - protein, 8 aa, Lama pocos
VVWVGHNY

SEQ ID NO: 3158 - protein, 14 aa, Lama pocos
NVKDYGQAHAYYDY

SEQ ID NO: 3159 - protein, 13 aa, Lama pocos
NVKDTGTTEDYDY

SEQ ID NO: 3160 - protein, 14 aa, Lama pocos
NVKDAGRVYNSYDY

SEQ ID NO: 3161 - protein, 14 aa, Lama pocos
NVKDTGTYRFYYDY

SEQ ID NO: 3162 - protein, 14 aa, Lama pocos
NVKDAGVYNRYYDY

SEQ ID NO: 3163 - protein, 14 aa, Lama pocos
NVKDWGFASHAYDY

SEQ ID NO: 3164 - protein, 14 aa, Lama pocos
NVKDFGWQHQEYDY

SEQ ID NO: 3165 - protein, 14 aa, Lama pocos
NVKDSGSFNQAYDY

SEQ ID NO: 3166 - protein, 14 aa, Lama pocos
NVKDYGVHFKRYDY

SEQ ID NO: 3167 - protein, 14 aa, Lama pocos
NVKDAGNTTSAYDY

SEQ ID NO: 3168 - protein, 8 aa, Lama pocos
EVQVGAWY

SEQ ID NO: 3169 - protein, 14 aa, Lama pocos
NVKDIDAEAYAYDY

SEQ ID NO: 3170 - protein, 14 aa, Lama pocos
NVKDSGQWRVQYDY

SEQ ID NO: 3171 - protein, 14 aa, Lama pocos
NVKDHGAQNQMYDY

SEQ ID NO: 3172 - protein, 14 aa, Lama pocos
NVKDVGHHYEYYDY

SEQ ID NO: 3173 - protein, 14 aa, Lama pocos
NVKDKGQMRAAYDY

SEQ ID NO: 3174 - protein, 14 aa, Lama pocos
NVKDYGSSYYKYDY

SEQ ID NO: 3175 - protein, 13 aa, Lama pocos
NVKDAGSSYWDYD

SEQ ID NO: 3176 - protein, 18 aa, Lama pocos
AAARWGRTKPLNTYYYSY

SEQ ID NO: 3177 - protein, 8 aa, Lama pocos
RVHVGAHY

SEQ ID NO: 3178 - protein, 17 aa, Lama pocos
AAATEGHAHALYRLHYY

SEQ ID NO: 3179 - protein, 8 aa, Lama pocos
RVWVGTHY

SEQ ID NO: 3180 - protein, 18 aa, Lama pocos
AAAYVGAENPLPYSMYGY

SEQ ID NO: 3181 - protein, 18 aa, Lama pocos
AAADYGASDPLWFIHYLY

SEQ ID NO: 3182 - protein, 18 aa, Lama pocos
AAANYGSNFPLAEEDYWY

SEQ ID NO: 3183 - protein, 19 aa, Lama pocos
AAAYYFGDDIPLWWEAYSY

SEQ ID NO: 3184 - protein, 18 aa, Lama pocos
AAARWGRHMPLSATEYSY

SEQ ID NO: 3185 - protein, 18 aa, Lama pocos
AAAAWGNSAPLTTYRYYY

SEQ ID NO: 3186 - protein, 8 aa, Lama pocos
YVYVGAQY

SEQ ID NO: 3187 - protein, 18 aa, Lama pocos
AAADWGYDWPLWDEWYWY

SEQ ID NO: 3188 - protein, 18 aa, Lama pocos
AAANYGANYPLYSQQYSY

SEQ ID NO: 3189 - protein, 18 aa, Lama pocos
AAANYGANEPLQYTHYNY

SEQ ID NO: 3190 - protein, 18 aa, Lama pocos
AAASYGAAHPLSIMRYYY

SEQ ID NO: 3191 - protein, 18 aa, Lama pocos
AAASYGANFPLKASDYSY

SEQ ID NO: 3192 - protein, 18 aa, Lama pocos
AAADWGYDWPLWDEWYWY

SEQ ID NO: 3193 - protein, 18 aa, Lama pocos
AAATWGHSWPLYNDEYWY

SEQ ID NO: 3194 - protein, 18 aa, Lama pocos
AAAAWGYAWPLHQDDYWY

SEQ ID NO: 3195 - protein, 18 aa, Lama pocos
AAATWGYSWPLIAEYNWY

SEQ ID NO: 3196 - protein, 8 aa, Lama pocos
FVKVGNWY

SEQ ID NO: 3197 - protein, 18 aa, Lama pocos
AAANWGYSWPLYEADDWY

SEQ ID NO: 3198 - protein, 8 aa, Lama pocos
YVYVGGSY

SEQ ID NO: 3199 - protein, 8 aa, Lama pocos
RVFVGMHY

SEQ ID NO: 3200 - protein, 18 aa, Lama pocos
AAANWGYSWPLYQTEYWY

SEQ ID NO: 3201 - protein, 8 aa, Lama pocos
YVKVGEWY

SEQ ID NO: 3202 - protein, 8 aa, Lama pocos
YVVVGWGY

SEQ ID NO: 3203 - protein, 8 aa, Lama pocos
FVVVGNGY

SEQ ID NO: 3204 - protein, 8 aa, Lama pocos
YVYVGGSY

SEQ ID NO: 3205 - protein, 8 aa, Lama pocos
LVYVGATY

SEQ ID NO: 3206 - protein, 8 aa, Lama pocos
YVYVGASY

SEQ ID NO: 3207 - protein, 8 aa, Lama pocos
YVYVGGSY

SEQ ID NO: 3208 - protein, 8 aa, Lama pocos
YVYVGASY

SEQ ID NO: 3209 - protein, 8 aa, Lama pocos
AVQVGYWY

SEQ ID NO: 3210 - protein, 8 aa, Lama pocos
YVYVGAGY

SEQ ID NO: 3211 - protein, 8 aa, Lama pocos
YVWVGRSY

SEQ ID NO: 3212 - protein, 8 aa, Lama pocos
YVYVGSSY

SEQ ID NO: 3213 - protein, 8 aa, Lama pocos
YVYVGESY

SEQ ID NO: 3214 - protein, 8 aa, Lama pocos
VVWVGEVY

SEQ ID NO: 3215 - protein, 14 aa, Lama pocos
NVKDEGNTTAYYDY

SEQ ID NO: 3216 - protein, 14 aa, Lama pocos
NVKDFGTQEHYYDY

SEQ ID NO: 3217 - protein, 14 aa, Lama pocos
NVKDFGGYRYYYDY

SEQ ID NO: 3218 - protein, 14 aa, Lama pocos
NVKDEGAIAKNYDY

SEQ ID NO: 3219 - protein, 14 aa, Lama pocos
NVKDEGYTGYYYDY

SEQ ID NO: 3220 - protein, 14 aa, Lama pocos
NVKDWGSQDRYYDY

SEQ ID NO: 3221 - protein, 14 aa, Lama pocos
NVKDEGKSSQVYDY

SEQ ID NO: 3222 - protein, 14 aa, Lama pocos
NVKDVGNDQKSYDY

SEQ ID NO: 3223 - protein, 14 aa, Lama pocos
NVKDWGTYSTYYDY

SEQ ID NO: 3224 - protein, 8 aa, Lama pocos
YVYVGASY

SEQ ID NO: 3225 - protein, 14 aa, Lama pocos
NVKDWGWLAQYYDY

SEQ ID NO: 3226 - protein, 14 aa, Lama pocos
NVKDEGMWQHYYDY

SEQ ID NO: 3227 - protein, 14 aa, Lama pocos
NVKDEGNSQSHYDY

SEQ ID NO: 3228 - protein, 14 aa, Lama pocos
NVKDAGNSKALYDY

SEQ ID NO: 3229 - protein, 14 aa, Lama pocos
NVKDWGRAGARYDY

SEQ ID NO: 3230 - protein, 14 aa, Lama pocos
NVKDMDRWRTTYDY

SEQ ID NO: 3231 - protein, 8 aa, Lama pocos
YVWVGNQY

SEQ ID NO: 3232 - protein, 14 aa, Lama pocos
NVKDWGYEYEGYDY

SEQ ID NO: 3233 - protein, 14 aa, Lama pocos
NVKDTGTYQAWYDY

SEQ ID NO: 3234 - protein, 14 aa, Lama pocos
NVKDWGGYQWYYDY

SEQ ID NO: 3235 - protein, 14 aa, Lama pocos
NVKDYGAQAHYYDY

SEQ ID NO: 3236 - protein, 14 aa, Lama pocos
NVKDWGTYNSYYDY

SEQ ID NO: 3237 - protein, 8 aa, Lama pocos
LVYVGSTY

SEQ ID NO: 3238 - protein, 18 aa, Lama pocos
AAAHYGDNFPLAYQAYLY

SEQ ID NO: 3239 - protein, 18 aa, Lama pocos
AAARWGRDEPLYHYYYSY

SEQ ID NO: 3240 - protein, 14 aa, Lama pocos
NVKDIGAQEVHYDY

SEQ ID NO: 3241 - protein, 18 aa, Lama pocos
AAANYGNNWPLTGVNYWY

SEQ ID NO: 3242 - protein, 8 aa, Lama pocos
YVWVGDSY

SEQ ID NO: 3243 - protein, 18 aa, Lama pocos
AAAKYGQNFPLSYHAYRY

SEQ ID NO: 3244 - protein, 18 aa, Lama pocos
AAARYGRSDPLHYHEYSY

SEQ ID NO: 3245 - protein, 18 aa, Lama pocos
AAASWGYTWPLYTYDYWY

SEQ ID NO: 3246 - protein, 14 aa, Lama pocos
NVKDSGQYRENYDY

SEQ ID NO: 3247 - protein, 8 aa, Lama pocos
WVYVGDYY

SEQ ID NO: 3248 - protein, 18 aa, Lama pocos
AAARWGRQYPLTFVYYSY

SEQ ID NO: 3249 - protein, 18 aa, Lama pocos
AAARWGRTYPLSYMAYTY

SEQ ID NO: 3250 - protein, 18 aa, Lama pocos
AAARWGRYEPLHYAYYSY

SEQ ID NO: 3251 - protein, 18 aa, Lama pocos
AAASYGANWPLVSAAYTY

SEQ ID NO: 3252 - protein, 19 aa, Lama pocos
AAARYGHAQAPLHYFWYGY

SEQ ID NO: 3253 - protein, 8 aa, Lama pocos
YVYVGFSY

SEQ ID NO: 3254 - protein, 8 aa, Lama pocos
YVYVGSSY

SEQ ID NO: 3255 - protein, 8 aa, Lama pocos
YVYVGASY

SEQ ID NO: 3256 - protein, 8 aa, Lama pocos
AVMVGFWY

SEQ ID NO: 3257 - protein, 8 aa, Lama pocos
YVYVGSSY

SEQ ID NO: 3258 - protein, 8 aa, Lama pocos
AVHVGQTY

SEQ ID NO: 3259 - protein, 8 aa, Lama pocos
YVWVGHTY

SEQ ID NO: 3260 - protein, 8 aa, Lama pocos
YVYVGTSY

SEQ ID NO: 3261 - protein, 8 aa, Lama pocos
YVYVGYSY

SEQ ID NO: 3262 - protein, 11 aa, Lama pocos
AIGLNLSSSSV

SEQ ID NO: 3263 - protein, 18 aa, Lama pocos
AAAGLGTVVSEWDYDYDY

SEQ ID NO: 3264 - protein, 13 aa, Lama pocos
HALIKNELGFLDY

SEQ ID NO: 3265 - protein, 13 aa, Lama pocos
HALIKNELGFLDY

SEQ ID NO: 3266 - protein, 9 aa, Homo sapiens
MQALQTPQT

SEQ ID NO: 3267 - protein, 10 aa, Homo sapiens
QQYNKWPPWT

SEQ ID NO: 3268 - protein, 9 aa, Homo sapiens
QQYYSSPYA

SEQ ID NO: 3269 - protein, 9 aa, Homo sapiens
HQYYNTPRT

SEQ ID NO: 3270 - protein, 9 aa, Homo sapiens
RQRSNWPPT

SEQ ID NO: 3271 - protein, 9 aa, Homo sapiens
QQSYSTPPT

SEQ ID NO: 3272 - protein, 9 aa, Homo sapiens
QQTYRPPWT

SEQ ID NO: 3273 - protein, 9 aa, Homo sapiens
MQTLQTPYT

SEQ ID NO: 3274 - protein, 9 aa, Homo sapiens
QQYDNLPLT

SEQ ID NO: 3275 - protein, 9 aa, Homo sapiens
MQATQFPYT

SEQ ID NO: 3276 - protein, 9 aa, Homo sapiens
QQYYSTYGS

SEQ ID NO: 3277 - protein, 11 aa, Homo sapiens
GTWDSSLSVVV

SEQ ID NO: 3278 - protein, 11 aa, Homo sapiens
AAWDDSLNGVV

SEQ ID NO: 3279 - protein, 9 aa, Homo sapiens
LQHNNYPLT

SEQ ID NO: 3280 - protein, 9 aa, Mus musculus
ALWYSNHWV

SEQ ID NO: 3281 - protein, 9 aa, Mus musculus
QQGNTLPYT

SEQ ID NO: 3282 - protein, 8 aa, Mus musculus
LQYDEFRT

SEQ ID NO: 3283 - protein, 9 aa, Mus musculus
ALWYSNQFI

SEQ ID NO: 3284 - protein, 9 aa, Mus musculus
ALWYSNHWV

SEQ ID NO: 3285 - protein, 9 aa, Mus musculus
QQNNEDPLT

SEQ ID NO: 3286 - protein, 9 aa, Mus musculus
FQGSHVPPT

SEQ ID NO: 3287 - protein, 9 aa, Mus musculus
QQNNEDPLT

SEQ ID NO: 3288 - protein, 8 aa, Mus musculus
LQYDEFRT

SEQ ID NO: 3289 - protein, 9 aa, Mus musculus
ALWYSNQFI

SEQ ID NO: 3290 - protein, 9 aa, Mus musculus
QQNNEDPLT

SEQ ID NO: 3291 - protein, 9 aa, Mus musculus
QQSRKVPWT

SEQ ID NO: 3292 - protein, 9 aa, Mus musculus
QQWSSNPPT

SEQ ID NO: 3293 - protein, 9 aa, Mus musculus
QQSRKVPWT

SEQ ID NO: 3294 - protein, 9 aa, Mus musculus
ALWYSNHWV

SEQ ID NO: 3295 - protein, 11 aa, Mus musculus
AAWDDSLIYVL

SEQ ID NO: 3296 - protein, 9 aa, Mus musculus
ALWYNNHWV

SEQ ID NO: 3297 - protein, 9 aa, Mus musculus
QQWSSYPLT

SEQ ID NO: 3298 - protein, 9 aa, Mus musculus
FQGSHVPYT

SEQ ID NO: 3299 - protein, 9 aa, Mus musculus
QQSRKVPWT

SEQ ID NO: 3300 - protein, 9 aa, Mus musculus
QQWSSYPLT

SEQ ID NO: 3301 - protein, 9 aa, Mus musculus
QQSRKVPWT

SEQ ID NO: 3302 - protein, 9 aa, Mus musculus
QQSKEVPWT

SEQ ID NO: 3303 - protein, 9 aa, Mus musculus
QQSNEDPYT

SEQ ID NO: 3304 - protein, 9 aa, Mus musculus
QQNNEDPLT

SEQ ID NO: 3305 - protein, 9 aa, Mus musculus
QQSSSWPLT

SEQ ID NO: 3306 - protein, 9 aa, Mus musculus
QQSSSWPLT

SEQ ID NO: 3307 - protein, 10 aa, Homo sapiens
QSYDSSNHWV

SEQ ID NO: 3308 - protein, 9 aa, Homo sapiens
QQSYSTPRT

SEQ ID NO: 3309 - protein, 9 aa, Homo sapiens
QQYYSTPFT

SEQ ID NO: 3310 - protein, 10 aa, Homo sapiens
QQYGSSRSWT

SEQ ID NO: 3311 - protein, 11 aa, Homo sapiens
QQSYSTFTLYT

SEQ ID NO: 3312 - protein, 9 aa, Homo sapiens
QQSHSFPFT

SEQ ID NO: 3313 - protein, 8 aa, Homo sapiens
QQLNSYVT

SEQ ID NO: 3314 - protein, 11 aa, Homo sapiens
AARDDSLSGWV

SEQ ID NO: 3315 - protein, 8 aa, Homo sapiens
QQRTNWPL

SEQ ID NO: 3316 - protein, 8 aa, Homo sapiens
QQNYSTWT

SEQ ID NO: 3317 - protein, 10 aa, Homo sapiens
CSYAVSSTWV

SEQ ID NO: 3318 - protein, 11 aa, Homo sapiens
QQRSNWPPAFT

SEQ ID NO: 3319 - protein, 11 aa, Homo sapiens
QQRSNWPPKIT

SEQ ID NO: 3320 - protein, 9 aa, Homo sapiens
QQYYNNQWT

SEQ ID NO: 3321 - protein, 9 aa, Homo sapiens
QQSFVSPRT

SEQ ID NO: 3322 - protein, 9 aa, Homo sapiens
LQHKSYPLT

SEQ ID NO: 3323 - protein, 10 aa, Homo sapiens
QQYGSSPPLT

SEQ ID NO: 3324 - protein, 11 aa, Homo sapiens
AAWDDSLNGVV

SEQ ID NO: 3325 - protein, 9 aa, Homo sapiens
TQATQFPYT

SEQ ID NO: 3326 - protein, 9 aa, Homo sapiens
MQGTHWPPT

SEQ ID NO: 3327 - protein, 9 aa, Homo sapiens
MQGTHWPPT

SEQ ID NO: 3328 - protein, 10 aa, Homo sapiens
SSYTSSSIVV

SEQ ID NO: 3329 - protein, 9 aa, Homo sapiens
MQGTHWPPT

SEQ ID NO: 3330 - protein, 9 aa, Homo sapiens
LQHNSYPIT

SEQ ID NO: 3331 - protein, 11 aa, Homo sapiens
QSYDGSNHNVV

SEQ ID NO: 3332 - protein, 10 aa, Homo sapiens
QSYDSSNHVV

SEQ ID NO: 3333 - protein, 9 aa, Homo sapiens
QQYGSSPPT

SEQ ID NO: 3334 - protein, 9 aa, Homo sapiens
QQSYSIPRT

SEQ ID NO: 3335 - protein, 9 aa, Homo sapiens
LQHNSYPLT

SEQ ID NO: 3336 - protein, 9 aa, Homo sapiens
QAWDSSTGV

SEQ ID NO: 3337 - protein, 9 aa, Homo sapiens
HQYSKWPVT

SEQ ID NO: 3338 - protein, 8 aa, Homo sapiens
MQALQMGT

SEQ ID NO: 3339 - protein, 10 aa, Homo sapiens
QQSYSTPPYT

SEQ ID NO: 3340 - protein, 8 aa, Homo sapiens
QQYGSSRT

SEQ ID NO: 3341 - protein, 9 aa, Homo sapiens
QQYDTLPLT

SEQ ID NO: 3342 - protein, 9 aa, Homo sapiens
QQSYSTPRT

SEQ ID NO: 3343 - protein, 10 aa, Homo sapiens
QQLNSYPRMT

SEQ ID NO: 3344 - protein, 9 aa, Homo sapiens
QQRSNWPGT

SEQ ID NO: 3345 - protein, 9 aa, Homo sapiens
QQFNNFLLT

SEQ ID NO: 3346 - protein, 10 aa, Homo sapiens [sequence omitted]

SEQ ID NO: 3347 - protein, 11 aa, Homo sapiens
QVWDSSADHYV

SEQ ID NO: 3348 - protein, 12 aa, Homo sapiens
QSYDRSLSVLYV

SEQ ID NO: 3349 - protein, 9 aa, Homo sapiens
QQANSFRLT

SEQ ID NO: 3350 - protein, 9 aa, Homo sapiens
QQYGRSPYT

SEQ ID NO: 3351 - protein, 11 aa, Homo sapiens
NSRDSSGNTVV

SEQ ID NO: 3352 - protein, 9 aa, Homo sapiens
QQYHNLPIT

SEQ ID NO: 3353 - protein, 9 aa, Homo sapiens
HQSSSLPYT

SEQ ID NO: 3354 - protein, 11 aa, Homo sapiens
TTWDASRGGWV

SEQ ID NO: 3355 - protein, 9 aa, Homo sapiens
QQYHNVPPA

SEQ ID NO: 3356 - protein, 10 aa, Homo sapiens
QQSYSSPPWT

SEQ ID NO: 3357 - protein, 11 aa, Homo sapiens
AAWDDSLSGPV

SEQ ID NO: 3358 - protein, 9 aa, Homo sapiens
QHLNIDPIT

SEQ ID NO: 3359 - protein, 8 aa, Homo sapiens
QQRGNSIT

SEQ ID NO: 3360 - protein, 10 aa, Homo sapiens
QQSYNTLALS

SEQ ID NO: 3361 - protein, 9 aa, Homo sapiens
QQYADLPYT

SEQ ID NO: 3362 - protein, 9 aa, Homo sapiens
QQSYSPPHS

SEQ ID NO: 3363 - protein, 9 aa, Homo sapiens
QQSYSTPCT

SEQ ID NO: 3364 - protein, 10 aa, Homo sapiens
QQYYITPQLT

SEQ ID NO: 3365 - protein, 8 aa, Homo sapiens
QQYYGYPT

SEQ ID NO: 3366 - protein, 10 aa, Homo sapiens
QQSYSAPPWT

SEQ ID NO: 3367 - protein, 8 aa, Homo sapiens
QQYGSSRT

SEQ ID NO: 3368 - protein, 12 aa, Homo sapiens
QSYDSSLSGSWV

SEQ ID NO: 3369 - protein, 10 aa, Homo sapiens
VLYMGSGIVV

SEQ ID NO: 3370 - protein, 10 aa, Homo sapiens
MQGTHWPPGT

SEQ ID NO: 3371 - protein, 9 aa, Homo sapiens
QQYDNLPRT

SEQ ID NO: 3372 - protein, 11 aa, Homo sapiens
QVWDSSSDPYV

SEQ ID NO: 3373 - protein, 8 aa, Homo sapiens
QQYNNLYT

SEQ ID NO: 3374 - protein, 10 aa, Homo sapiens
QHYNNWPLYT

SEQ ID NO: 3375 - protein, 10 aa, Homo sapiens
MQGTHWPPGT

SEQ ID NO: 3376 - protein, 9 aa, Homo sapiens
QQYDNLPLT

SEQ ID NO: 3377 - protein, 9 aa, Homo sapiens
QQYNSYSHT

SEQ ID NO: 3378 - protein, 10 aa, Homo sapiens
QQSYSTPPYT

SEQ ID NO: 3379 - protein, 9 aa, Homo sapiens
QQTYSTPRT

SEQ ID NO: 3380 - protein, 10 aa, Homo sapiens
QQLNSYPPIT

SEQ ID NO: 3381 - protein, 11 aa, Homo sapiens
AAWDDSLNGWV

SEQ ID NO: 3382 - protein, 11 aa, Homo sapiens
ATWDDSLNGRV

SEQ ID NO: 3383 - protein, 9 aa, Homo sapiens
QQYGSSPRT

SEQ ID NO: 3384 - protein, 11 aa, Homo sapiens
NSRDSSGNHWV

SEQ ID NO: 3385 - protein, 10 aa, Homo sapiens
QQYNSYSPLT

SEQ ID NO: 3386 - protein, 8 aa, Homo sapiens
QQYYSFWA

SEQ ID NO: 3387 - protein, 9 aa, Homo sapiens
QLLNTDPIT

SEQ ID NO: 3388 - protein, 9 aa, Homo sapiens
QQSYSTPLT

SEQ ID NO: 3389 - protein, 11 aa, Homo sapiens
AAWDDSLNGWV

SEQ ID NO: 3390 - protein, 11 aa, Homo sapiens
AVWDDSLNGWV

SEQ ID NO: 3391 - protein, 9 aa, Homo sapiens
QQSYSIPRT

SEQ ID NO: 3392 - protein, 9 aa, Homo sapiens
QQYGSSPWT

SEQ ID NO: 3393 - protein, 5 aa, Homo sapiens
QQLGT

SEQ ID NO: 3394 - protein, 8 aa, Homo sapiens
QQTNSFPT

SEQ ID NO: 3395 - protein, 9 aa, Homo sapiens
QQYDNSPWT

SEQ ID NO: 3396 - protein, 9 aa, Homo sapiens
QQSDNVPVT

SEQ ID NO: 3397 - protein, 9 aa, Homo sapiens
QSYDSALVV

SEQ ID NO: 3398 - protein, 11 aa, Homo sapiens
QSYDSSLSVVV

SEQ ID NO: 3399 - protein, 11 aa, Homo sapiens
SSFTSSSTPYV

SEQ ID NO: 3400 - protein, 11 aa, Homo sapiens
AAWDDSLNGPV

SEQ ID NO: 3401 - protein, 10 aa, Homo sapiens
QQSYNTPPWT

SEQ ID NO: 3402 - protein, 11 aa, Homo sapiens
AAWDDSLSRVV

SEQ ID NO: 3403 - protein, 11 aa, Homo sapiens
AAWDDSLSGVI

SEQ ID NO: 3404 - protein, 9 aa, Homo sapiens
MQALQTPRT

SEQ ID NO: 3405 - protein, 10 aa, Homo sapiens
CMQGTHWPPT

SEQ ID NO: 3406 - protein, 10 aa, Homo sapiens
MQGTHWPMYT

SEQ ID NO: 3407 - protein, 9 aa, Homo sapiens
QQHDNVPLT

SEQ ID NO: 3408 - protein, 10 aa, Homo sapiens
QQLNSYPPYT

SEQ ID NO: 3409 - protein, 9 aa, Homo sapiens
QQLNSYPFT

SEQ ID NO: 3410 - protein, 9 aa, Homo sapiens
QQLNSYPLT

SEQ ID NO: 3411 - protein, 10 aa, Homo sapiens
QQSYSTPPDT

SEQ ID NO: 3412 - protein, 10 aa, Homo sapiens
QQSYTTPLFT

SEQ ID NO: 3413 - protein, 10 aa, Homo sapiens
QQSYTTPLFT

SEQ ID NO: 3414 - protein, 9 aa, Homo sapiens
HQYDNLPPT

SEQ ID NO: 3415 - protein, 9 aa, Homo sapiens
QQLNSYPLT

SEQ ID NO: 3416 - protein, 10 aa, Homo sapiens
QQLNSNPPIT

SEQ ID NO: 3417 - protein, 10 aa, Homo sapiens
QQSYSTPPYT

SEQ ID NO: 3418 - protein, 9 aa, Homo sapiens
QQYNSYPYT

SEQ ID NO: 3419 - protein, 9 aa, Homo sapiens
QQSYSTPRT

SEQ ID NO: 3420 - protein, 9 aa, Homo sapiens
QQYGSSPRT

SEQ ID NO: 3421 - protein, 9 aa, Homo sapiens
QQYDNLPIT

SEQ ID NO: 3422 - protein, 9 aa, Homo sapiens
QQYGSSPWT

SEQ ID NO: 3423 - protein, 11 aa, Homo sapiens
AAWDDSLNGPV

SEQ ID NO: 3424 - protein, 8 aa, Homo sapiens
QQYNSYWT

SEQ ID NO: 3425 - protein, 10 aa, Homo sapiens
SSDAGSNNVV

SEQ ID NO: 3426 - protein, 10 aa, Homo sapiens
QQSYSTPPWT

SEQ ID NO: 3427 - protein, 9 aa, Homo sapiens
QQRSNWPLT

SEQ ID NO: 3428 - protein, 9 aa, Homo sapiens
QQYDNLPPT

SEQ ID NO: 3429 - protein, 5 aa, Homo sapiens
QQRIT

SEQ ID NO: 3430 - protein, 10 aa, Homo sapiens
QQSYSTPPAT

SEQ ID NO: 3431 - protein, 11 aa, Homo sapiens
QVWDSSSDHVV

SEQ ID NO: 3432 - protein, 9 aa, Homo sapiens
MQALQTPFT

SEQ ID NO: 3433 - protein, 9 aa, Homo sapiens
QQYNNYRYT

SEQ ID NO: 3434 - protein, 8 aa, Homo sapiens
QQYNSYST

SEQ ID NO: 3435 - protein, 9 aa, Homo sapiens
MQALQTPHT

SEQ ID NO: 3436 - protein, 8 aa, Homo sapiens
QQYNSYST

SEQ ID NO: 3437 - protein, 10 aa, Homo sapiens
QQSYSTPPLT

SEQ ID NO: 3438 - protein, 9 aa, Homo sapiens
QQYGSSPRT

SEQ ID NO: 3439 - protein, 9 aa, Homo sapiens
QQYGSSPRT

SEQ ID NO: 3440 - protein, 9 aa, Homo sapiens
QQYTTTPRT

SEQ ID NO: 3441 - protein, 9 aa, Homo sapiens
QQYGTTPRT

SEQ ID NO: 3442 - protein, 11 aa, Homo sapiens
SSYEGSNNFVV

SEQ ID NO: 3443 - protein, 11 aa, Homo sapiens
QVWDSSRDHVV

SEQ ID NO: 3444 - protein, 12 aa, Homo sapiens
AAWDDSLSGFVV

SEQ ID NO: 3445 - protein, 10 aa, Homo sapiens
NSYTSSSTRV

SEQ ID NO: 3446 - protein, 11 aa, Homo sapiens
SSYAGSNNYVV

SEQ ID NO: 3447 - protein, 9 aa, Homo sapiens
QQYNSYPYT

SEQ ID NO: 3448 - protein, 12 aa, Homo sapiens
AAWDDSLNGAWV

SEQ ID NO: 3449 - protein, 10 aa, Homo sapiens
SSYTSSSTWV

SEQ ID NO: 3450 - protein, 9 aa, Homo sapiens
QQHNSSPLT

SEQ ID NO: 3451 - protein, 10 aa, Homo sapiens
QSYDSSLYAV

SEQ ID NO: 3452 - protein, 9 aa, Homo sapiens
MQVLQIPYT

SEQ ID NO: 3453 - protein, 11 aa, Homo sapiens
QSYDSGNHWVV

SEQ ID NO: 3454 - protein, 14 aa, Homo sapiens
GAWDSSLSAGGVYV

SEQ ID NO: 3455 - protein, 9 aa, Homo sapiens
QTWGTGILV

SEQ ID NO: 3456 - protein, 11 aa, Homo sapiens
SSYTSSSTSVV

SEQ ID NO: 3457 - protein, 9 aa, Homo sapiens
QQYDNLPQT

SEQ ID NO: 3458 - protein, 10 aa, Homo sapiens
CSYAGSSTLV

SEQ ID NO: 3459 - protein, 9 aa, Homo sapiens
QQLNSDSYT

SEQ ID NO: 3460 - protein, 9 aa, Homo sapiens
QQLNSYPPA

SEQ ID NO: 3461 - protein, 11 aa, Homo sapiens
QQRNNWPPEWT

SEQ ID NO: 3462 - protein, 9 aa, Homo sapiens
QQYGSSPWT

SEQ ID NO: 3463 - protein, 9 aa, Homo sapiens
QSYDSSNLV

SEQ ID NO: 3464 - protein, 11 aa, Homo sapiens
AAWDDSLNGVV

SEQ ID NO: 3465 - protein, 10 aa, Homo sapiens
QQYGSSRALT

SEQ ID NO: 3466 - protein, 13 aa, Homo sapiens
QVWDSSSDHPGVV

SEQ ID NO: 3467 - protein, 9 aa, Homo sapiens
QQYNNWPIT

SEQ ID NO: 3468 - protein, 10 aa, Homo sapiens
SSYTSSSTLL

SEQ ID NO: 3469 - protein, 10 aa, Homo sapiens
QQSYSTPPWT

SEQ ID NO: 3470 - protein, 13 aa, Homo sapiens
QVWDSSSDRPGVV

SEQ ID NO: 3471 - protein, 9 aa, Homo sapiens
QQYNSYPWT

SEQ ID NO: 3472 - protein, 9 aa, Homo sapiens
QSYDSSNWV

SEQ ID NO: 3473 - protein, 9 aa, Homo sapiens
QQYDNLPLT

SEQ ID NO: 3474 - protein, 9 aa, Homo sapiens
QQLNSYSYT

SEQ ID NO: 3475 - protein, 9 aa, Homo sapiens
QSYDSSNWV

SEQ ID NO: 3476 - protein, 10 aa, Homo sapiens
CSYAGASTFV

SEQ ID NO: 3477 - protein, 10 aa, Homo sapiens
SSYTSSSTRV

SEQ ID NO: 3478 - protein, 10 aa, Homo sapiens
SSYTSSTTRV

SEQ ID NO: 3479 - protein, 11 aa, Homo sapiens
SSYRGSSTPYV

SEQ ID NO: 3480 - protein, 10 aa, Homo sapiens
LLSYSGARPV

SEQ ID NO: 3481 - protein, 10 aa, Homo sapiens
QQYNNWPPLT

SEQ ID NO: 3482 - protein, 10 aa, Homo sapiens
SSYRSSSTLV

SEQ ID NO: 3483 - protein, 10 aa, Homo sapiens
QSYDSSNYWV

SEQ ID NO: 3484 - protein, 10 aa, Homo sapiens
CSYAGSSTWV

SEQ ID NO: 3485 - protein, 9 aa, Homo sapiens
QQYDNLPIT

SEQ ID NO: 3486 - protein, 9 aa, Homo sapiens
QQYNNWPRT

SEQ ID NO: 3487 - protein, 11 aa, Homo sapiens
QVWDSSSDPWV

SEQ ID NO: 3488 - protein, 10 aa, Homo sapiens
CSYAGASTFV

SEQ ID NO: 3489 - protein, 9 aa, Homo sapiens
QQYGSSPWT

SEQ ID NO: 3490 - protein, 9 aa, Homo sapiens
QQANSFPLT

SEQ ID NO: 3491 - protein, 9 aa, Homo sapiens
QQYDNLPRS

SEQ ID NO: 3492 - protein, 10 aa, Homo sapiens
QQSYSTPPWT

SEQ ID NO: 3493 - protein, 9 aa, Homo sapiens
QQYVSSPWT

SEQ ID NO: 3494 - protein, 9 aa, Homo sapiens
QQRSNWPRG

SEQ ID NO: 3495 - protein, 8 aa, Homo sapiens
QQYGSSLT

SEQ ID NO: 3496 - protein, 10 aa, Homo sapiens
QQLNSYPQGT

SEQ ID NO: 3497 - protein, 9 aa, Homo sapiens
QQYNNWPRT

SEQ ID NO: 3498 - protein, 10 aa, Homo sapiens
CSYAGSSTRL

SEQ ID NO: 3499 - protein, 10 aa, Homo sapiens
QQSYSTPPWT

SEQ ID NO: 3500 - protein, 10 aa, Homo sapiens
QQSYSTPPWT

SEQ ID NO: 3501 - protein, 10 aa, Homo sapiens
QQSYSTPPIT

SEQ ID NO: 3502 - protein, 8 aa, Homo sapiens
QQRRNWGT

SEQ ID NO: 3503 - protein, 11 aa, Homo sapiens
QQSYSTPPEYT

SEQ ID NO: 3504 - protein, 11 aa, Homo sapiens
QQLNSYPPKFT

SEQ ID NO: 3505 - protein, 10 aa, Homo sapiens
SSYAGSSTQV

SEQ ID NO: 3506 - protein, 10 aa, Homo sapiens
SSYTSSSAQL

SEQ ID NO: 3507 - protein, 10 aa, Homo sapiens
SSYTSGSTQV

SEQ ID NO: 3508 - protein, 9 aa, Homo sapiens
QQYDNLPIT

SEQ ID NO: 3509 - protein, 9 aa, Homo sapiens
MQGTHWPPT

SEQ ID NO: 3510 - protein, 11 aa, Homo sapiens
QSYDSSLSGVV

SEQ ID NO: 3511 - protein, 11 aa, Homo sapiens
QVWDSSSDPWV

SEQ ID NO: 3512 - protein, 12 aa, Homo sapiens
QVWDSSSDHPVV

SEQ ID NO: 3513 - protein, 13 aa, Homo sapiens
QSYDSSNHEEIWV

SEQ ID NO: 3514 - protein, 11 aa, Homo sapiens
QVWDNNSDHLV

SEQ ID NO: 3515 - protein, 9 aa, Homo sapiens
QQYGSSPRT

SEQ ID NO: 3516 - protein, 12 aa, Homo sapiens
AAWDDSLSGRVV

SEQ ID NO: 3517 - protein, 11 aa, Homo sapiens
AAWDDSLNGPV

SEQ ID NO: 3518 - protein, 12 aa, Homo sapiens
QSADSSGTYLVV

SEQ ID NO: 3519 - protein, 9 aa, Homo sapiens
QQSYSTPWT

SEQ ID NO: 3520 - protein, 11 aa, Homo sapiens
AAWDDSLNGPV

SEQ ID NO: 3521 - protein, 11 aa, Homo sapiens
LLYYGGAQRWV

SEQ ID NO: 3522 - protein, 10 aa, Homo sapiens
YSYAGSSTFV

SEQ ID NO: 3523 - protein, 11 aa, Homo sapiens
AAWDDSLSGWV

SEQ ID NO: 3524 - protein, 9 aa, Homo sapiens
QQYGSSPRT

SEQ ID NO: 3525 - protein, 10 aa, Homo sapiens
TSYAGSNNFV

SEQ ID NO: 3526 - protein, 10 aa, Homo sapiens
SSYTSSSTQV

SEQ ID NO: 3527 - protein, 10 aa, Homo sapiens
SSYTSSSTQV

SEQ ID NO: 3528 - protein, 10 aa, Homo sapiens
SSYTVSSTQV

SEQ ID NO: 3529 - protein, 10 aa, Homo sapiens
SSYTSSSAQL

SEQ ID NO: 3530 - protein, 10 aa, Homo sapiens
SSYTSSSAQV

SEQ ID NO: 3531 - protein, 9 aa, Homo sapiens
QQSYSTPPT

SEQ ID NO: 3532 - protein, 9 aa, Homo sapiens
QQSYSTPRT

SEQ ID NO: 3533 - protein, 10 aa, Homo sapiens
LQHNSYPILT

SEQ ID NO: 3534 - protein, 12 aa, Homo sapiens
QVWDSSSDHPYV

SEQ ID NO: 3535 - protein, 9 aa, Homo sapiens
QHYGSSLWT

SEQ ID NO: 3536 - protein, 9 aa, Mus musculus
FQGSHVPLT

SEQ ID NO: 3537 - protein, 11 aa, Homo sapiens
QQRSNWPPALT

SEQ ID NO: 3538 - protein, 10 aa, Homo sapiens
CSYAGSSTWV

SEQ ID NO: 3539 - protein, 9 aa, Homo sapiens
MQALQTPGT

SEQ ID NO: 3540 - protein, 9 aa, Homo sapiens
MQALQTPGT

SEQ ID NO: 3541 - protein, 10 aa, Homo sapiens
CSYAGVRTVV

SEQ ID NO: 3542 - protein, 10 aa, Homo sapiens
CSYAGVRTVV

SEQ ID NO: 3543 - protein, 9 aa, Homo sapiens
QQYGSSPWT

SEQ ID NO: 3544 - protein, 9 aa, Homo sapiens
QQYDNLLFT

SEQ ID NO: 3545 - protein, 11 aa, Homo sapiens
SSYTSSSTLWV

SEQ ID NO: 3546 - protein, 8 aa, Homo sapiens
QQSYSTFT

SEQ ID NO: 3547 - protein, 9 aa, Homo sapiens
QQYYTAPLT

SEQ ID NO: 3548 - protein, 10 aa, Homo sapiens
QQRSNWPPYT

SEQ ID NO: 3549 - protein, 10 aa, Homo sapiens
SSYTSSTTWV

SEQ ID NO: 3550 - protein, 12 aa, Homo sapiens
QSFDSSLSGSDV

SEQ ID NO: 3551 - protein, 12 aa, Homo sapiens
AAWDASLSGHVV

SEQ ID NO: 3552 - protein, 9 aa, Homo sapiens
MQRIEFPWT

SEQ ID NO: 3553 - protein, 9 aa, Homo sapiens
QQYYTAPLT

SEQ ID NO: 3554 - protein, 9 aa, Homo sapiens
QQYNSYPWT

SEQ ID NO: 3555 - protein, 12 aa, Homo sapiens
QSADSSGTYFWV

SEQ ID NO: 3556 - protein, 9 aa, Homo sapiens
QQYYTAPLT

SEQ ID NO: 3557 - protein, 11 aa, Homo sapiens
SVWDDSLNGPL

SEQ ID NO: 3558 - protein, 9 aa, Homo sapiens
QSSDSSGVV

SEQ ID NO: 3559 - protein, 9 aa, Homo sapiens
QQYNSYSWT

SEQ ID NO: 3560 - protein, 11 aa, Homo sapiens
SVWDDSLNGPL

SEQ ID NO: 3561 - protein, 9 aa, Homo sapiens
QQSYSTPPT

SEQ ID NO: 3562 - protein, 9 aa, Homo sapiens
QQSYNTPRT

SEQ ID NO: 3563 - protein, 8 aa, Homo sapiens
QQTNSFPT

SEQ ID NO: 3564 - protein, 8 aa, Homo sapiens
QQYGNSPQ

SEQ ID NO: 3565 - protein, 10 aa, Homo sapiens
QQYNSYSTWT

SEQ ID NO: 3566 - protein, 9 aa, Homo sapiens
QQSYNTPYT

SEQ ID NO: 3567 - protein, 11 aa, Homo sapiens
AAWDDSLNALV

SEQ ID NO: 3568 - protein, 9 aa, Homo sapiens
QQSYSTPGT

SEQ ID NO: 3569 - protein, 10 aa, Homo sapiens
QQSDNLPMYT

SEQ ID NO: 3570 - protein, 12 aa, Homo sapiens
QVWDSSSDHHVV

SEQ ID NO: 3571 - protein, 11 aa, Homo sapiens
LVWDDSLNGLV

SEQ ID NO: 3572 - protein, 12 aa, Homo sapiens
QSYDSRLSGFVV

SEQ ID NO: 3573 - protein, 9 aa, Homo sapiens
QQSYTTLLT

SEQ ID NO: 3574 - protein, 9 aa, Homo sapiens
QQYGSSPWT

SEQ ID NO: 3575 - protein, 11 aa, Homo sapiens
QSYDSSLSDSV

SEQ ID NO: 3576 - protein, 9 aa, Homo sapiens
QLLNSHPLT

SEQ ID NO: 3577 - protein, 11 aa, Homo sapiens
NSRDSSGNAVV

SEQ ID NO: 3578 - protein, 9 aa, Homo sapiens
QQYANLPFT

SEQ ID NO: 3579 - protein, 11 aa, Homo sapiens
NSRDSSGNAVV

SEQ ID NO: 3580 - protein, 11 aa, Homo sapiens
AVWDDSLNGLV

SEQ ID NO: 3581 - protein, 9 aa, Homo sapiens
QQSYSTPWT

SEQ ID NO: 3582 - protein, 9 aa, Homo sapiens
HQYNNWPQT

SEQ ID NO: 3583 - protein, 11 aa, Homo sapiens
QSYDGINRAWV

SEQ ID NO: 3584 - protein, 9 aa, Homo sapiens
MQALQTPLT

SEQ ID NO: 3585 - protein, 10 aa, Homo sapiens
QQSYSSLSIT

SEQ ID NO: 3586 - protein, 10 aa, Homo sapiens
QQSYEIPPWT

SEQ ID NO: 3587 - protein, 9 aa, Homo sapiens
QQYDNLPPV

SEQ ID NO: 3588 - protein, 11 aa, Homo sapiens
QSYDSSLSGSV

SEQ ID NO: 3589 - protein, 9 aa, Homo sapiens
QSYDSGNPI

SEQ ID NO: 3590 - protein, 8 aa, Homo sapiens
QQYYSTLT

SEQ ID NO: 3591 - protein, 9 aa, Homo sapiens
QQYDNLPPV

SEQ ID NO: 3592 - protein, 11 aa, Homo sapiens
QSYDGINRWLV

SEQ ID NO: 3593 - protein, 14 aa, Homo sapiens
GADHGSGSNFEYVV

SEQ ID NO: 3594 - protein, 11 aa, Homo sapiens
AAWDDSLNGYV

SEQ ID NO: 3595 - protein, 9 aa, Homo sapiens
QQLNSYPVT

SEQ ID NO: 3596 - protein, 12 aa, Homo sapiens
SSYTSSSTLLYV

SEQ ID NO: 3597 - protein, 12 aa, Homo sapiens
QVWDSSSDHPGV

SEQ ID NO: 3598 - protein, 11 aa, Homo sapiens
HYRSNWPPVLT

SEQ ID NO: 3599 - protein, 10 aa, Homo sapiens
QQYDNLYSVH

SEQ ID NO: 3600 - protein, 12 aa, Homo sapiens
SSYTSSSTLLYV

SEQ ID NO: 3601 - protein, 12 aa, Homo sapiens
SSYTSSSTLLYV

SEQ ID NO: 3602 - protein, 9 aa, Homo sapiens
QLLNSHPLT

SEQ ID NO: 3603 - protein, 11 aa, Homo sapiens
QHRTNWPPLFT

SEQ ID NO: 3604 - protein, 9 aa, Homo sapiens
QAWDSSTGV

SEQ ID NO: 3605 - protein, 9 aa, Homo sapiens
QQYNTYSGT

SEQ ID NO: 3606 - protein, 9 aa, Homo sapiens
QAWDSSTGV

SEQ ID NO: 3607 - protein, 9 aa, Homo sapiens
QQTYSTFWT

SEQ ID NO: 3608 - protein, 9 aa, Homo sapiens
QAWDSSTAV

SEQ ID NO: 3609 - protein, 10 aa, Homo sapiens
SSYTSSRAVL

SEQ ID NO: 3610 - protein, 13 aa, Homo sapiens
QVWDSSSDHPEWV

SEQ ID NO: 3611 - protein, 8 aa, Homo sapiens
QQSYSTPT

SEQ ID NO: 3612 - protein, 11 aa, Homo sapiens
SSYTSSSTHVV

SEQ ID NO: 3613 - protein, 9 aa, Homo sapiens
QQYNTYSGT

SEQ ID NO: 3614 - protein, 9 aa, Homo sapiens
QQYYTAPLT

SEQ ID NO: 3615 - protein, 10 aa, Homo sapiens
QHYGSSRGWT

SEQ ID NO: 3616 - protein, 9 aa, Homo sapiens
QQYGRSPIT

SEQ ID NO: 3617 - protein, 9 aa, Homo sapiens
QAWDSSTVV

SEQ ID NO: 3618 - protein, 9 aa, Homo sapiens
QQSYSTPYT

SEQ ID NO: 3619 - protein, 10 aa, Homo sapiens
QSYDSSLGAL

SEQ ID NO: 3620 - protein, 9 aa, Homo sapiens
QQANSFPPT

SEQ ID NO: 3621 - protein, 8 aa, Homo sapiens
QQRGNWWT

SEQ ID NO: 3622 - protein, 11 aa, Homo sapiens
QHRTNWPPLFT

SEQ ID NO: 3623 - protein, 10 aa, Homo sapiens
QQCYNWPPWT

SEQ ID NO: 3624 - protein, 11 aa, Homo sapiens
HKRSNWPPSLT

SEQ ID NO: 3625 - protein, 9 aa, Homo sapiens
QQYYSISWT

SEQ ID NO: 3626 - protein, 11 aa, Homo sapiens
CSYAVSTTYVI

SEQ ID NO: 3627 - protein, 9 aa, Homo sapiens
QQYYSTPWT

SEQ ID NO: 3628 - protein, 14 aa, Homo sapiens
GADHGSGSNFVFVV

SEQ ID NO: 3629 - protein, 9 aa, Homo sapiens
MQALQTPFT

SEQ ID NO: 3630 - protein, 10 aa, Homo sapiens
QQYNYWPPLT

SEQ ID NO: 3631 - protein, 12 aa, Homo sapiens
QVWDSSSDHHVV

SEQ ID NO: 3632 - protein, 9 aa, Homo sapiens
QQYNTYSQT

SEQ ID NO: 3633 - protein, 10 aa, Homo sapiens
QAWDNDAGVV

SEQ ID NO: 3634 - protein, 9 aa, Homo sapiens
QQYNSHPPT

SEQ ID NO: 3635 - protein, 10 aa, Homo sapiens
SAYAGSNNLV

SEQ ID NO: 3636 - protein, 14 aa, Homo sapiens
GADHGSGSNFEYVV

SEQ ID NO: 3637 - protein, 8 aa, Homo sapiens
CSYAGIVL

SEQ ID NO: 3638 - protein, 11 aa, Homo sapiens
QSGDSSGTYVV

SEQ ID NO: 3639 - protein, 13 aa, Homo sapiens
QSVDRSGTYFNWV

SEQ ID NO: 3640 - protein, 9 aa, Homo sapiens
QQSYSTPYT

SEQ ID NO: 3641 - protein, 9 aa, Homo sapiens
LLYYGGAWV

SEQ ID NO: 3642 - protein, 11 aa, Homo sapiens
QSYDGSNHAVV

SEQ ID NO: 3643 - protein, 11 aa, Homo sapiens
QVWDSSSDPVV

SEQ ID NO: 3644 - protein, 9 aa, Homo sapiens
MQALQTPQT

SEQ ID NO: 3645 - protein, 8 aa, Homo sapiens
QQYGGSLT

SEQ ID NO: 3646 - protein, 9 aa, Homo sapiens
QAWDSSLVV

SEQ ID NO: 3647 - protein, 10 aa, Homo sapiens
SSYTSSSLRV

SEQ ID NO: 3648 - protein, 9 aa, Homo sapiens
QQLNSYPVT

SEQ ID NO: 3649 - protein, 10 aa, Homo sapiens
CSYAGSYTYV

SEQ ID NO: 3650 - protein, 11 aa, Homo sapiens
SSYTSSSTLVL

SEQ ID NO: 3651 - protein, 11 aa, Homo sapiens
QQRSNWPPSYT

SEQ ID NO: 3652 - protein, 10 aa, Homo sapiens
SSYTSISTWV

SEQ ID NO: 3653 - protein, 11 aa, Homo sapiens
FSMDSSGDLRV

SEQ ID NO: 3654 - protein, 10 aa, Homo sapiens
QQSYSTPGLT

SEQ ID NO: 3655 - protein, 10 aa, Homo sapiens
ISYTSSRTLV

SEQ ID NO: 3656 - protein, 12 aa, Homo sapiens
QVWDSSYYHPVV

SEQ ID NO: 3657 - protein, 11 aa, Homo sapiens
LVWDDSLNGLV

SEQ ID NO: 3658 - protein, 11 aa, Homo sapiens
GTWDSSLSAVV

SEQ ID NO: 3659 - protein, 9 aa, Homo sapiens
QQYSIYSWT

SEQ ID NO: 3660 - protein, 9 aa, Homo sapiens
QQSYSTPWT

SEQ ID NO: 3661 - protein, 9 aa, Homo sapiens
QQANSLPLT

SEQ ID NO: 3662 - protein, 11 aa, Homo sapiens
AAWDDSLNGVV

SEQ ID NO: 3663 - protein, 11 aa, Homo sapiens
AAWDDSLNGWV

SEQ ID NO: 3664 - protein, 9 aa, Homo sapiens
QAWDSSTAV

SEQ ID NO: 3665 - protein, 9 aa, Homo sapiens
HQYNNWPQT

SEQ ID NO: 3666 - protein, 8 aa, Homo sapiens
QQSYSTLT

SEQ ID NO: 3667 - protein, 11 aa, Homo sapiens
QHRSNWPPRLT

SEQ ID NO: 3668 - protein, 9 aa, Homo sapiens
QQSYSTPGT

SEQ ID NO: 3669 - protein, 8 aa, Homo sapiens
QQYGSSYT

SEQ ID NO: 3670 - protein, 9 aa, Homo sapiens
QQTYSTFWT

SEQ ID NO: 3671 - protein, 11 aa, Homo sapiens
AAWDDSLSSWV

SEQ ID NO: 3672 - protein, 9 aa, Homo sapiens
QSYDSGNPI

SEQ ID NO: 3673 - protein, 9 aa, Homo sapiens
QAWSSSTAV

SEQ ID NO: 3674 - protein, 11 aa, Homo sapiens
SSYTSSTLNVL

SEQ ID NO: 3675 - protein, 9 aa, Homo sapiens
QQSYSTPGT

SEQ ID NO: 3676 - protein, 12 aa, Homo sapiens
QSYDSSLSGWSV

SEQ ID NO: 3677 - protein, 12 aa, Homo sapiens
SSYTSSSTLLYV

SEQ ID NO: 3678 - protein, 10 aa, Homo sapiens
QQSYSTHMST

SEQ ID NO: 3679 - protein, 7 aa, Homo sapiens
MQSIQLA

SEQ ID NO: 3680 - protein, 10 aa, Homo sapiens
QQYNYWPPLT

SEQ ID NO: 3681 - protein, 12 aa, Homo sapiens
SSGDSSTDHHVV

SEQ ID NO: 3682 - protein, 9 aa, Homo sapiens
HQSYGVPIT

SEQ ID NO: 3683 - protein, 11 aa, Homo sapiens
QQYNNWPPMYT

SEQ ID NO: 3684 - protein, 10 aa, Homo sapiens
QSYDSSKYVV

SEQ ID NO: 3685 - protein, 9 aa, Homo sapiens
QQYGSSPWT

SEQ ID NO: 3686 - protein, 10 aa, Homo sapiens
MQALQTPLYT

SEQ ID NO: 3687 - protein, 10 aa, Homo sapiens
QQSYSSLSIT

SEQ ID NO: 3688 - protein, 11 aa, Homo sapiens
HKRSNWPPSLT

SEQ ID NO: 3689 - protein, 11 aa, Homo sapiens
QSTASSGTYVV

SEQ ID NO: 3690 - protein, 9 aa, Homo sapiens
QQYNSYSPT

SEQ ID NO: 3691 - protein, 11 aa, Homo sapiens
QSYDGINRWLV

SEQ ID NO: 3692 - protein, 9 aa, Homo sapiens
QQYNNWPGT

SEQ ID NO: 3693 - protein, 10 aa, Homo sapiens
QQYGSSPPYT

SEQ ID NO: 3694 - protein, 14 aa, Homo sapiens
GADHGSGSNFVYVV

SEQ ID NO: 3695 - protein, 10 aa, Homo sapiens
QHFGSSSQWT

SEQ ID NO: 3696 - protein, 9 aa, Homo sapiens
LLYYGGPWV

SEQ ID NO: 3697 - protein, 9 aa, Homo sapiens
QQYNNWPLA

SEQ ID NO: 3698 - protein, 11 aa, Homo sapiens
CSYAGGNTFVV

SEQ ID NO: 3699 - protein, 9 aa, Homo sapiens
QQYNNWPRT

SEQ ID NO: 3700 - protein, 11 aa, Homo sapiens
SSYTSSSTPVV

SEQ ID NO: 3701 - protein, 9 aa, Homo sapiens
MQALQTPRT

SEQ ID NO: 3702 - protein, 9 aa, Homo sapiens
QQSYSTPWT

SEQ ID NO: 3703 - protein, 11 aa, Homo sapiens
AVWDDSLNGLV

SEQ ID NO: 3704 - protein, 10 aa, Homo sapiens
QQCYNWPPWT

SEQ ID NO: 3705 - protein, 9 aa, Homo sapiens
QAWDSSTGV

SEQ ID NO: 3706 - protein, 9 aa, Homo sapiens
QQYHNLPRT

SEQ ID NO: 3707 - protein, 9 aa, Homo sapiens
QQLNSYPFT

SEQ ID NO: 3708 - protein, 9 aa, Homo sapiens
QQYYSISWT

SEQ ID NO: 3709 - protein, 11 aa, Homo sapiens
SSYTSSSTLYV

SEQ ID NO: 3710 - protein, 9 aa, Homo sapiens
QKYNSAPWT

SEQ ID NO: 3711 - protein, 9 aa, Homo sapiens
QAWDSSTGV

SEQ ID NO: 3712 - protein, 9 aa, Homo sapiens
QQLNSYPIT

SEQ ID NO: 3713 - protein, 11 aa, Homo sapiens
AVWDDSLNGLV

SEQ ID NO: 3714 - protein, 11 aa, Homo sapiens
AAWDDSLNGVV

SEQ ID NO: 3715 - protein, 9 aa, Homo sapiens
QQSYTTLLT

SEQ ID NO: 3716 - protein, 11 aa, Homo sapiens
SSYTSTSTPWV

SEQ ID NO: 3717 - protein, 10 aa, Homo sapiens
QQYHVWPPIT

SEQ ID NO: 3718 - protein, 9 aa, Homo sapiens
QQYYSTPLT

SEQ ID NO: 3719 - protein, 9 aa, Homo sapiens
QQGNSFPLT

SEQ ID NO: 3720 - protein, 11 aa, Homo sapiens
QSYDSSLSAWV

SEQ ID NO: 3721 - protein, 9 aa, Homo sapiens
QQYNTYSQT

SEQ ID NO: 3722 - protein, 11 aa, Homo sapiens
QQRSNWPPGVT

SEQ ID NO: 3723 - protein, 9 aa, Homo sapiens
HQYDYLPYT

SEQ ID NO: 3724 - protein, 10 aa, Homo sapiens
QQTYSTPLYT

SEQ ID NO: 3725 - protein, 11 aa, Homo sapiens
QHRTNWPPLFT

SEQ ID NO: 3726 - protein, 11 aa, Homo sapiens
QSADSSGTYVV

SEQ ID NO: 3727 - protein, 9 aa, Homo sapiens
QQYNTYSGT

SEQ ID NO: 3728 - protein, 14 aa, Homo sapiens
GADHGSGSNFVFVV

SEQ ID NO: 3729 - protein, 9 aa, Homo sapiens
QQYYSPPWT

SEQ ID NO: 3730 - protein, 10 aa, Homo sapiens
QQYHNLPPIT

SEQ ID NO: 3731 - protein, 10 aa, Homo sapiens
QAWDSSTGGV

SEQ ID NO: 3732 - protein, 13 aa, Homo sapiens
QQYDNLPPGVSTT

SEQ ID NO: 3733 - protein, 11 aa, Homo sapiens
CSTDSSGNQRV

SEQ ID NO: 3734 - protein, 11 aa, Homo sapiens
SSYTSSSTHVV

SEQ ID NO: 3735 - protein, 11 aa, Homo sapiens
QSADTIGTYWV

SEQ ID NO: 3736 - protein, 11 aa, Homo sapiens
QQYNNWPPMYT

SEQ ID NO: 3737 - protein, 10 aa, Homo sapiens
QQYDNLYSVH

SEQ ID NO: 3738 - protein, 10 aa, Homo sapiens
QQSYEMPPWT

SEQ ID NO: 3739 - protein, 9 aa, Homo sapiens
QSADSSGYV

SEQ ID NO: 3740 - protein, 11 aa, Homo sapiens
SSYTSSSIPYV

SEQ ID NO: 3741 - protein, 8 aa, Homo sapiens
QQRGNWWT

SEQ ID NO: 3742 - protein, 11 aa, Homo sapiens
YSTDTSGNHWV

SEQ ID NO: 3743 - protein, 11 aa, Homo sapiens
YSTDSSGNHRV

SEQ ID NO: 3744 - protein, 9 aa, Homo sapiens
HQYGTSPYT

SEQ ID NO: 3745 - protein, 8 aa, Homo sapiens
QQYNNFLT

SEQ ID NO: 3746 - protein, 8 aa, Homo sapiens
QQYYSTPG

SEQ ID NO: 3747 - protein, 11 aa, Homo sapiens
QSYDSSLSDSV

SEQ ID NO: 3748 - protein, 11 aa, Homo sapiens
QSADSSGTSWV

SEQ ID NO: 3749 - protein, 9 aa, Homo sapiens
QQYGSSPFT

SEQ ID NO: 3750 - protein, 9 aa, Homo sapiens
QQYNSYSLT

SEQ ID NO: 3751 - protein, 9 aa, Homo sapiens
QQYNNWWRT

SEQ ID NO: 3752 - protein, 11 aa, Homo sapiens
YSTDSSGNHWV

SEQ ID NO: 3753 - protein, 11 aa, Homo sapiens
NFRDSSGHHPV

SEQ ID NO: 3754 - protein, 11 aa, Homo sapiens
AAWDDSLNALV

SEQ ID NO: 3755 - protein, 9 aa, Homo sapiens
QQYNNWPGT

SEQ ID NO: 3756 - protein, 9 aa, Homo sapiens
YSAADNNRV

SEQ ID NO: 3757 - protein, 11 aa, Homo sapiens
NSRDSSGNAVV

SEQ ID NO: 3758 - protein, 10 aa, Homo sapiens
QQYDNLLLFT

SEQ ID NO: 3759 - protein, 12 aa, Homo sapiens
QQRSNWPPRTWT

SEQ ID NO: 3760 - protein, 11 aa, Homo sapiens
HYRSNWPPVLT

SEQ ID NO: 3761 - protein, 11 aa, Homo sapiens
NSRDSSGNAVV

SEQ ID NO: 3762 - protein, 13 aa, Homo sapiens
NSRDSSGYIWGWM

SEQ ID NO: 3763 - protein, 11 aa, Homo sapiens
QVWDSSSDHWV

SEQ ID NO: 3764 - protein, 10 aa, Homo sapiens
QSYDSSLGAL

SEQ ID NO: 3765 - protein, 9 aa, Homo sapiens
QSWDTGIGV

SEQ ID NO: 3766 - protein, 9 aa, Homo sapiens
QAWDSSTVV

SEQ ID NO: 3767 - protein, 11 aa, Homo sapiens
CSYVGSSTYVV

SEQ ID NO: 3768 - protein, 10 aa, Homo sapiens
QSADSSSHWV

SEQ ID NO: 3769 - protein, 9 aa, Homo sapiens
QSFDSGNVV

SEQ ID NO: 3770 - protein, 11 aa, Homo sapiens
VAWDDSRNGLV

SEQ ID NO: 3771 - protein, 8 aa, Homo sapiens
QQYYSTRT

SEQ ID NO: 3772 - protein, 10 aa, Homo sapiens
QQYYSTPPYT

SEQ ID NO: 3773 - protein, 11 aa, Homo sapiens
LAWDDSLNGLV

SEQ ID NO: 3774 - protein, 11 aa, Homo sapiens
AAWDASLSGWV

SEQ ID NO: 3775 - protein, 11 aa, Homo sapiens
QSVDGSGSSVV

SEQ ID NO: 3776 - protein, 10 aa, Homo sapiens
QAWDSSTHVV

SEQ ID NO: 3777 - protein, 11 aa, Homo sapiens
SSYTSSSTPFV

SEQ ID NO: 3778 - protein, 9 aa, Homo sapiens
ETWDSNTRV

SEQ ID NO: 3779 - protein, 10 aa, Homo sapiens
QQSYSTPMHT

SEQ ID NO: 3780 - protein, 9 aa, Homo sapiens
QQLNSYLGT

SEQ ID NO: 3781 - protein, 9 aa, Homo sapiens
QQANSFPPT

SEQ ID NO: 3782 - protein, 11 aa, Homo sapiens
LVWDDSLNGLV

SEQ ID NO: 3783 - protein, 10 aa, Homo sapiens
CSYAGSSTWG

SEQ ID NO: 3784 - protein, 12 aa, Homo sapiens
QVWDSSSDHHVV

SEQ ID NO: 3785 - protein, 9 aa, Homo sapiens
MQALQTPLT

SEQ ID NO: 3786 - protein, 11 aa, Homo sapiens
QQYNNWPPMYT

SEQ ID NO: 3787 - protein, 9 aa, Homo sapiens
QQYNNWPRT

SEQ ID NO: 3788 - protein, 5 aa, Homo sapiens
QTWGT

SEQ ID NO: 3789 - protein, 9 aa, Homo sapiens
MQSIQPPLT

SEQ ID NO: 3790 - protein, 9 aa, Homo sapiens
QQYYSTPLT

SEQ ID NO: 3791 - protein, 11 aa, Homo sapiens
SSFTSRGALVL

SEQ ID NO: 3792 - protein, 8 aa, Homo sapiens
CSYAGIWV

SEQ ID NO: 3793 - protein, 9 aa, Homo sapiens
QHYGSSRST

SEQ ID NO: 3794 - protein, 8 aa, Homo sapiens
QQSYSTPT

SEQ ID NO: 3795 - protein, 9 aa, Homo sapiens
QQSYSTPYT

SEQ ID NO: 3796 - protein, 12 aa, Homo sapiens
NSRDSSGNHLRV

SEQ ID NO: 3797 - protein, 9 aa, Homo sapiens
QQYGRSPIT

SEQ ID NO: 3798 - protein, 10 aa, Homo sapiens
QQYDNLLQFT

SEQ ID NO: 3799 - protein, 9 aa, Homo sapiens
YSTDSSGNV

SEQ ID NO: 3800 - protein, 9 aa, Homo sapiens
QQYNSYSLT

SEQ ID NO: 3801 - protein, 9 aa, Homo sapiens
QYYGSSPFG

SEQ ID NO: 3802 - protein, 11 aa, Homo sapiens
QQRSNWPPRLT

SEQ ID NO: 3803 - protein, 11 aa, Homo sapiens
AVWDDSLNGVV

SEQ ID NO: 3804 - protein, 11 aa, Homo sapiens
LVWDDSLNGLV

SEQ ID NO: 3805 - protein, 10 aa, Homo sapiens
SSYTSSRAVL

SEQ ID NO: 3806 - protein, 9 aa, Homo sapiens
QQYYSSHWT

SEQ ID NO: 3807 - protein, 10 aa, Homo sapiens
YSYAGSSTWV

SEQ ID NO: 3808 - protein, 11 aa, Homo sapiens
QSTDSSGSYVV

SEQ ID NO: 3809 - protein, 9 aa, Homo sapiens
HQSYFTPQT

SEQ ID NO: 3810 - protein, 9 aa, Homo sapiens
QQYGNSPFT

SEQ ID NO: 3811 - protein, 9 aa, Homo sapiens
QQYVEPPFT

SEQ ID NO: 3812 - protein, 10 aa, Homo sapiens
SAYAGSNNLV

SEQ ID NO: 3813 - protein, 8 aa, Homo sapiens
QQYGSSYT

SEQ ID NO: 3814 - protein, 9 aa, Homo sapiens
QQSYSTPGT

SEQ ID NO: 3815 - protein, 9 aa, Homo sapiens
QQYGRSSGT

SEQ ID NO: 3816 - protein, 10 aa, Homo sapiens
QQYGSSPLIT

SEQ ID NO: 3817 - protein, 9 aa, Homo sapiens
QQYYTAPLT

SEQ ID NO: 3818 - protein, 9 aa, Homo sapiens
LLYYGGAWV

SEQ ID NO: 3819 - protein, 9 aa, Homo sapiens
HQSSSLPPT

SEQ ID NO: 3820 - protein, 10 aa, Homo sapiens
QRRSNWPPFT

SEQ ID NO: 3821 - protein, 10 aa, Homo sapiens
QSYDSSNYWV

SEQ ID NO: 3822 - protein, 11 aa, Homo sapiens
NSRDSSGNAVV

SEQ ID NO: 3823 - protein, 9 aa, Homo sapiens
QQYYSSPYT

SEQ ID NO: 3824 - protein, 9 aa, Homo sapiens
QQYNNWWRT

SEQ ID NO: 3825 - protein, 10 aa, Homo sapiens
QQYGSSPRLT

SEQ ID NO: 3826 - protein, 11 aa, Homo sapiens
AVWDDSLNGLV

SEQ ID NO: 3827 - protein, 11 aa, Homo sapiens
QSYDSSLNGDV

SEQ ID NO: 3828 - protein, 11 aa, Homo sapiens
QQRSNWPLIFT

SEQ ID NO: 3829 - protein, 11 aa, Homo sapiens
QSYDSSLSGYV

SEQ ID NO: 3830 - protein, 10 aa, Homo sapiens
QQSYSTPPIT

SEQ ID NO: 3831 - protein, 10 aa, Homo sapiens
QQSYSTPPWT

SEQ ID NO: 3832 - protein, 9 aa, Homo sapiens
QQYANLPFT

SEQ ID NO: 3833 - protein, 11 aa, Homo sapiens
VAWDDSRNGLV

SEQ ID NO: 3834 - protein, 13 aa, Homo sapiens
QSVDSSGTYPHVI

SEQ ID NO: 3835 - protein, 9 aa, Homo sapiens
QQSYSTPYT

SEQ ID NO: 3836 - protein, 9 aa, Homo sapiens
QQLNSYPLT

SEQ ID NO: 3837 - protein, 12 aa, Homo sapiens
TSYTSSSTLNVV

SEQ ID NO: 3838 - protein, 10 aa, Homo sapiens
CSYASSSIVV

SEQ ID NO: 3839 - protein, 10 aa, Homo sapiens
QQSYSTPPWT

SEQ ID NO: 3840 - protein, 10 aa, Homo sapiens
QQLNSYSFET

SEQ ID NO: 3841 - protein, 11 aa, Homo sapiens
QSYDGINRWLV

SEQ ID NO: 3842 - protein, 9 aa, Homo sapiens
QQYNSYPYT

SEQ ID NO: 3843 - protein, 9 aa, Homo sapiens
QQSSSSPIT

SEQ ID NO: 3844 - protein, 9 aa, Homo sapiens
QQSYTTLLT

SEQ ID NO: 3845 - protein, 11 aa, Homo sapiens
QVWDGINDRVV

SEQ ID NO: 3846 - protein, 9 aa, Homo sapiens
QQYDNLPPV

SEQ ID NO: 3847 - protein, 9 aa, Homo sapiens
QQSYSSEWT

SEQ ID NO: 3848 - protein, 11 aa, Homo sapiens
QSYDISLGGWV

SEQ ID NO: 3849 - protein, 10 aa, Homo sapiens
QQSYSMPPIT

SEQ ID NO: 3850 - protein, 12 aa, Homo sapiens
AAWDDSLNGSWV

SEQ ID NO: 3851 - protein, 11 aa, Homo sapiens
AAWDDSLSGLI

SEQ ID NO: 3852 - protein, 10 aa, Homo sapiens
CSYAGSSTWL

SEQ ID NO: 3853 - protein, 12 aa, Homo sapiens
QVWDSSSDHHVV

SEQ ID NO: 3854 - protein, 11 aa, Homo sapiens
VAWDDSRNGLV

SEQ ID NO: 3855 - protein, 11 aa, Homo sapiens
GTWDSSLSAYV

SEQ ID NO: 3856 - protein, 12 aa, Homo sapiens
QVWDSSSDHPGV

SEQ ID NO: 3857 - protein, 9 aa, Homo sapiens
QAWGSSRGV

SEQ ID NO: 3858 - protein, 12 aa, Homo sapiens
NSRDNSGNLNWV

SEQ ID NO: 3859 - protein, 9 aa, Homo sapiens
QQYDNLPYT

SEQ ID NO: 3860 - protein, 9 aa, Homo sapiens
QSADSSGSR

SEQ ID NO: 3861 - protein, 9 aa, Homo sapiens
QQYNNWPYT

SEQ ID NO: 3862 - protein, 10 aa, Homo sapiens
QQSYEIPPWT

SEQ ID NO: 3863 - protein, 11 aa, Homo sapiens
ATWDDSLNGPV

SEQ ID NO: 3864 - protein, 12 aa, Homo sapiens
QSYDSRLSGFVV

SEQ ID NO: 3865 - protein, 11 aa, Homo sapiens
QSADSSGTSVL

SEQ ID NO: 3866 - protein, 10 aa, Homo sapiens
CSYARSSTRV

SEQ ID NO: 3867 - protein, 9 aa, Homo sapiens
QSADSRGAV

SEQ ID NO: 3868 - protein, 11 aa, Homo sapiens
AVWDDSLHSYV

SEQ ID NO: 3869 - protein, 9 aa, Homo sapiens
QQSYSTPRT

SEQ ID NO: 3870 - protein, 9 aa, Homo sapiens
QQYDNLPLA

SEQ ID NO: 3871 - protein, 9 aa, Homo sapiens
QQSYTTLLT

SEQ ID NO: 3872 - protein, 11 aa, Homo sapiens
QSYDSSLSGWV

SEQ ID NO: 3873 - protein, 9 aa, Homo sapiens
QQYANLPFT

SEQ ID NO: 3874 - protein, 9 aa, Homo sapiens
QQYDNLPRT

SEQ ID NO: 3875 - protein, 11 aa, Homo sapiens
QSYDSSLSGYV

SEQ ID NO: 3876 - protein, 11 aa, Homo sapiens
CSYAVSTTYVI

SEQ ID NO: 3877 - protein, 10 aa, Homo sapiens
QQSYSNPSYT

SEQ ID NO: 3878 - protein, 11 aa, Homo sapiens
QQYGSSPPRYT

SEQ ID NO: 3879 - protein, 10 aa, Homo sapiens
QQSYSTLLYT

SEQ ID NO: 3880 - protein, 9 aa, Homo sapiens
MQALQTPFT

SEQ ID NO: 3881 - protein, 12 aa, Homo sapiens
QVWDSSSDRLYV

SEQ ID NO: 3882 - protein, 10 aa, Homo sapiens
QQSYSNPSYT

SEQ ID NO: 3883 - protein, 10 aa, Homo sapiens
CSYAGSSTWL

SEQ ID NO: 3884 - protein, 10 aa, Homo sapiens
QSYDSTSRVV

SEQ ID NO: 3885 - protein, 11 aa, Homo sapiens
QVWDSGSDHVV

SEQ ID NO: 3886 - protein, 9 aa, Homo sapiens
QQSYSTPQT

SEQ ID NO: 3887 - protein, 11 aa, Homo sapiens
ASWDDSLIGPV

SEQ ID NO: 3888 - protein, 10 aa, Homo sapiens
QQLNSYPGYT

SEQ ID NO: 3889 - protein, 9 aa, Homo sapiens
QSYDSNNQV

SEQ ID NO: 3890 - protein, 9 aa, Homo sapiens
QSYDSSDVV

SEQ ID NO: 3891 - protein, 12 aa, Homo sapiens
QVWDSSSDHHVV

SEQ ID NO: 3892 - protein, 11 aa, Homo sapiens
QSADSSGTYRV

SEQ ID NO: 3893 - protein, 9 aa, Homo sapiens
QQYYNWPLT

SEQ ID NO: 3894 - protein, 11 aa, Homo sapiens
QSADSSAAYVV

SEQ ID NO: 3895 - protein, 10 aa, Homo sapiens
YSTDSSGKGV

SEQ ID NO: 3896 - protein, 12 aa, Homo sapiens
QVWDSSSDPFYV

SEQ ID NO: 3897 - protein, 11 aa, Homo sapiens
QSYDGINRAWV

SEQ ID NO: 3898 - protein, 9 aa, Homo sapiens
QQYYSTPWT

SEQ ID NO: 3899 - protein, 9 aa, Homo sapiens
QQYNSYSYT

SEQ ID NO: 3900 - protein, 11 aa, Homo sapiens
QQYDDWPPEVT

SEQ ID NO: 3901 - protein, 11 aa, Homo sapiens
VAWDDSRNGLV

SEQ ID NO: 3902 - protein, 11 aa, Homo sapiens
QSFDIGRGGWI

SEQ ID NO: 3903 - protein, 9 aa, Homo sapiens
QQSYSTPPT

SEQ ID NO: 3904 - protein, 11 aa, Homo sapiens
QSYDSSLSGSV

SEQ ID NO: 3905 - protein, 8 aa, Homo sapiens
CSYAGSVL

SEQ ID NO: 3906 - protein, 9 aa, Homo sapiens
QQSFSTPRT

SEQ ID NO: 3907 - protein, 13 aa, Homo sapiens
QVWDSSSDHPEWV

SEQ ID NO: 3908 - protein, 9 aa, Homo sapiens
MQALQTPWT

SEQ ID NO: 3909 - protein, 11 aa, Homo sapiens
NSRDSSGNPRW

SEQ ID NO: 3910 - protein, 11 aa, Homo sapiens
QQYGSSPPRYT

SEQ ID NO: 3911 - protein, 11 aa, Homo sapiens
QSVDSSGTYRV

SEQ ID NO: 3912 - protein, 9 aa, Homo sapiens
QQYDNLPLA

SEQ ID NO: 3913 - protein, 9 aa, Homo sapiens
MQGTHWPYT

SEQ ID NO: 3914 - protein, 10 aa, Homo sapiens
CSYAGRYTWV

SEQ ID NO: 3915 - protein, 9 aa, Homo sapiens
QLLNSHPLT

SEQ ID NO: 3916 - protein, 9 aa, Homo sapiens
QSADSTGWV

SEQ ID NO: 3917 - protein, 9 aa, Homo sapiens
MQSIQLPYT

SEQ ID NO: 3918 - protein, 7 aa, Homo sapiens
MQSIQLA

SEQ ID NO: 3919 - protein, 10 aa, Homo sapiens
QHYGSSRGWT

SEQ ID NO: 3920 - protein, 9 aa, Homo sapiens
QQYYNWPLT

SEQ ID NO: 3921 - protein, 9 aa, Homo sapiens
QQYNSYPYT

SEQ ID NO: 3922 - protein, 10 aa, Homo sapiens
QQSYEIPPWT

SEQ ID NO: 3923 - protein, 9 aa, Homo sapiens
QQYANLPFT

SEQ ID NO: 3924 - protein, 10 aa, Homo sapiens
QHYGSSRGWT

SEQ ID NO: 3925 - protein, 13 aa, Homo sapiens
QSVDSSGTYPHVI

SEQ ID NO: 3926 - protein, 12 aa, Homo sapiens
QSYASSLSAHVV

SEQ ID NO: 3927 - protein, 8 aa, Homo sapiens
QQYYSSYT

SEQ ID NO: 3928 - protein, 11 aa, Homo sapiens
QQYGSSPPPFT

SEQ ID NO: 3929 - protein, 11 aa, Homo sapiens
SSYTSSSTPVV

SEQ ID NO: 3930 - protein, 9 aa, Homo sapiens
QKYNSAPPA

SEQ ID NO: 3931 - protein, 10 aa, Homo sapiens
QAWGSTTAKV

SEQ ID NO: 3932 - protein, 11 aa, Homo sapiens
QQRSNWPPRVT

SEQ ID NO: 3933 - protein, 12 aa, Homo sapiens
SSYTSSSTRHWV

SEQ ID NO: 3934 - protein, 9 aa, Homo sapiens
QQSYSTPYT

SEQ ID NO: 3935 - protein, 11 aa, Homo sapiens
SAYTTTSTSWV

SEQ ID NO: 3936 - protein, 10 aa, Homo sapiens
SSYVGNNNWV

SEQ ID NO: 3937 - protein, 9 aa, Homo sapiens
QQYDNPPLT

SEQ ID NO: 3938 - protein, 9 aa, Homo sapiens
LLSYSGVWV

SEQ ID NO: 3939 - protein, 10 aa, Homo sapiens [sequence omitted]

SEQ ID NO: 3940 - protein, 11 aa, Homo sapiens
QVWDSSSDHWV

SEQ ID NO: 3941 - protein, 10 aa, Homo sapiens
QQYNNWPPGT

SEQ ID NO: 3942 - protein, 9 aa, Homo sapiens
QAWDSSTAV

SEQ ID NO: 3943 - protein, 12 aa, Homo sapiens
QSADSSGTYSVV

SEQ ID NO: 3944 - protein, 9 aa, Homo sapiens
QQYNSYSIT

SEQ ID NO: 3945 - protein, 9 aa, Homo sapiens
QQLHSYPLT

SEQ ID NO: 3946 - protein, 10 aa, Homo sapiens
QQYGSSPLFT

SEQ ID NO: 3947 - protein, 10 aa, Homo sapiens
QQSYSTPPVT

SEQ ID NO: 3948 - protein, 10 aa, Homo sapiens
QQSYSTHMST

SEQ ID NO: 3949 - protein, 10 aa, Homo sapiens
QQRSNWPQVT

SEQ ID NO: 3950 - protein, 8 aa, Homo sapiens
QQYGSLYT

SEQ ID NO: 3951 - protein, 9 aa, Homo sapiens
QQYDNLPLT

SEQ ID NO: 3952 - protein, 9 aa, Homo sapiens
QQYGSSPGT

SEQ ID NO: 3953 - protein, 9 aa, Homo sapiens
QQYGSSLLT

SEQ ID NO: 3954 - protein, 10 aa, Homo sapiens
QQYGSSPRLT

SEQ ID NO: 3955 - protein, 10 aa, Homo sapiens [sequence omitted]

SEQ ID NO: 3956 - protein, 9 aa, Homo sapiens
QQYGSSPGT

SEQ ID NO: 3957 - protein, 11 aa, Homo sapiens
QQRSNWPPMYT

SEQ ID NO: 3958 - protein, 9 aa, Homo sapiens
MQGTHWPRT

SEQ ID NO: 3959 - protein, 9 aa, Homo sapiens
LQHNSYPPL

SEQ ID NO: 3960 - protein, 10 aa, Homo sapiens
QQRSNWPPYT

SEQ ID NO: 3961 - protein, 11 aa, Homo sapiens
QQRSNWPPSIT

SEQ ID NO: 3962 - protein, 9 aa, Homo sapiens
LQHNSYLWT

SEQ ID NO: 3963 - protein, 9 aa, Homo sapiens
QQYDNLPIT

SEQ ID NO: 3964 - protein, 10 aa, Homo sapiens
QQYGSSPGVT

SEQ ID NO: 3965 - protein, 9 aa, Homo sapiens
QQSYSTPQT

SEQ ID NO: 3966 - protein, 10 aa, Homo sapiens
SSYTSSSTWV

SEQ ID NO: 3967 - protein, 10 aa, Homo sapiens
QAWDSSTAVV

SEQ ID NO: 3968 - protein, 10 aa, Homo sapiens
QQYNYWPLIT

SEQ ID NO: 3969 - protein, 9 aa, Homo sapiens
QQSYSTPRT

SEQ ID NO: 3970 - protein, 9 aa, Homo sapiens
QVWASSSVV

SEQ ID NO: 3971 - protein, 9 aa, Homo sapiens
MQSIQLPPT

SEQ ID NO: 3972 - protein, 11 aa, Homo sapiens
QQRSNWPPRLT

SEQ ID NO: 3973 - protein, 7 aa, Homo sapiens
CSYAGSV

SEQ ID NO: 3974 - protein, 13 aa, Homo sapiens
SSYTSSSTLGLYV

SEQ ID NO: 3975 - protein, 11 aa, Homo sapiens
QSYDSSLSGSV

SEQ ID NO: 3976 - protein, 9 aa, Homo sapiens
LQHNSYPLT

SEQ ID NO: 3977 - protein, 10 aa, Homo sapiens
CSYAGSSTWV

SEQ ID NO: 3978 - protein, 10 aa, Homo sapiens
CSYAGSSTWV

SEQ ID NO: 3979 - protein, 10 aa, Homo sapiens
QQCYNWPPWT

SEQ ID NO: 3980 - protein, 9 aa, Homo sapiens
LQHNSYPLT

SEQ ID NO: 3981 - protein, 10 aa, Homo sapiens
QQSYTTFIYT

SEQ ID NO: 3982 - protein, 9 aa, Homo sapiens
QQYGSSPYT

SEQ ID NO: 3983 - protein, 10 aa, Homo sapiens
QQYDNLLSLT

SEQ ID NO: 3984 - protein, 10 aa, Homo sapiens
QQYYSTPPLT

SEQ ID NO: 3985 - protein, 8 aa, Homo sapiens
QQSYSTLT

SEQ ID NO: 3986 - protein, 11 aa, Homo sapiens
QSADSSGTYRV

SEQ ID NO: 3987 - protein, 11 aa, Homo sapiens
QVWDSSSDHYV

SEQ ID NO: 3988 - protein, 13 aa, Homo sapiens
AAWDDSLNGPHWV

SEQ ID NO: 3989 - protein, 9 aa, Homo sapiens
QQYYSTPLT

SEQ ID NO: 3990 - protein, 9 aa, Homo sapiens
QQYGSSPFT

SEQ ID NO: 3991 - protein, 9 aa, Homo sapiens
QQSYSTPLT

SEQ ID NO: 3992 - protein, 8 aa, Homo sapiens
QQSYSTLT

SEQ ID NO: 3993 - protein, 9 aa, Homo sapiens
QQYYSTPIT

SEQ ID NO: 3994 - protein, 9 aa, Homo sapiens
QQYYSTPYT

SEQ ID NO: 3995 - protein, 9 aa, Homo sapiens
QQANGFPPL

SEQ ID NO: 3996 - protein, 9 aa, Homo sapiens
QQSYSTPYT

SEQ ID NO: 3997 - protein, 10 aa, Homo sapiens
QQRSNWPPVT

SEQ ID NO: 3998 - protein, 10 aa, Homo sapiens
SSYTSSSTYV

SEQ ID NO: 3999 - protein, 9 aa, Homo sapiens
QQYDNLPLT

SEQ ID NO: 4000 - protein, 11 aa, Homo sapiens
CSYAGGSTSYV

SEQ ID NO: 4001 - protein, 10 aa, Homo sapiens
SSYAGNNDFV

SEQ ID NO: 4002 - protein, 10 aa, Homo sapiens
CSYAGHSTWV

SEQ ID NO: 4003 - protein, 10 aa, Homo sapiens
CSYAGTSTFV

SEQ ID NO: 4004 - protein, 10 aa, Homo sapiens
CSYAGSSSWV

SEQ ID NO: 4005 - protein, 10 aa, Homo sapiens
SSYTSSSTYV

SEQ ID NO: 4006 - protein, 10 aa, Homo sapiens
QQYYGSSPWT

SEQ ID NO: 4007 - protein, 8 aa, Homo sapiens
QQSYSTHA

SEQ ID NO: 4008 - protein, 11 aa, Homo sapiens
AAWDDSLNGPV

SEQ ID NO: 4009 - protein, 9 aa, Homo sapiens
QQYAGSPWT

SEQ ID NO: 4010 - protein, 11 aa, Homo sapiens
QQRSNWPPIFT

SEQ ID NO: 4011 - protein, 9 aa, Homo sapiens
MQGTHWPVT

SEQ ID NO: 4012 - protein, 9 aa, Homo sapiens
QQSYSNPLT

SEQ ID NO: 4013 - protein, 10 aa, Homo sapiens
CSYAGSYTWV

SEQ ID NO: 4014 - protein, 9 aa, Homo sapiens
QQYGSSRGT

SEQ ID NO: 4015 - protein, 10 aa, Homo sapiens
CSYAGSSTYV

SEQ ID NO: 4016 - protein, 12 aa, Homo sapiens
GTWDSSLSAGPV

SEQ ID NO: 4017 - protein, 11 aa, Homo sapiens
QQYGSSPPKYT

SEQ ID NO: 4018 - protein, 11 aa, Homo sapiens
QQYNNWPPSLT

SEQ ID NO: 4019 - protein, 9 aa, Homo sapiens
QQRSNWPLT

SEQ ID NO: 4020 - protein, 9 aa, Homo sapiens
QTWGTGIRV

SEQ ID NO: 4021 - protein, 11 aa, Homo sapiens
QSADSSGTYVV

SEQ ID NO: 4022 - protein, 12 aa, Homo sapiens
GTWDSSLSASYV

SEQ ID NO: 4023 - protein, 9 aa, Homo sapiens
QQYNNWPYT

SEQ ID NO: 4024 - protein, 9 aa, Homo sapiens
LQHNSYPFT

SEQ ID NO: 4025 - protein, 11 aa, Homo sapiens
SSYTSSSTPYV

SEQ ID NO: 4026 - protein, 9 aa, Homo sapiens
QQSYSNPLT

SEQ ID NO: 4027 - protein, 9 aa, Homo sapiens
QQYGSSPQT

SEQ ID NO: 4028 - protein, 12 aa, Homo sapiens
GTWDSSLSASYV

SEQ ID NO: 4029 - protein, 11 aa, Homo sapiens
GTWDSSLSAVV

SEQ ID NO: 4030 - protein, 12 aa, Homo sapiens
QSYDSSLSGPVV

SEQ ID NO: 4031 - protein, 11 aa, Homo sapiens
QVWDSSSDHVV

SEQ ID NO: 4032 - protein, 11 aa, Homo sapiens
AAWDDSLNGPV

SEQ ID NO: 4033 - protein, 11 aa, Homo sapiens
QSADSSGTYMI

SEQ ID NO: 4034 - protein, 8 aa, Homo sapiens
QQYDNLPR

SEQ ID NO: 4035 - protein, 10 aa, Homo sapiens
QQRSNWPPIT

SEQ ID NO: 4036 - protein, 10 aa, Homo sapiens
QQYDNLPSWT

SEQ ID NO: 4037 - protein, 10 aa, Homo sapiens
QQLNSYPPGT

SEQ ID NO: 4038 - protein, 11 aa, Homo sapiens
QQSYSTPRQWT

SEQ ID NO: 4039 - protein, 11 aa, Homo sapiens
QSYDSSLSGSV

SEQ ID NO: 4040 - protein, 5 aa, Homo sapiens
QQLYT

SEQ ID NO: 4041 - protein, 9 aa, Homo sapiens
MQGTHWPVT

SEQ ID NO: 4042 - protein, 7 aa, Homo sapiens
QQYNSYT

SEQ ID NO: 4043 - protein, 9 aa, Homo sapiens
LQHNSYPLT

SEQ ID NO: 4044 - protein, 9 aa, Homo sapiens
QQYNNWPLT

SEQ ID NO: 4045 - protein, 9 aa, Homo sapiens
QQTYITAFT

SEQ ID NO: 4046 - protein, 9 aa, Homo sapiens
QSYDSSNWV

SEQ ID NO: 4047 - protein, 11 aa, Homo sapiens
QSADSSGTYVV

SEQ ID NO: 4048 - protein, 11 aa, Homo sapiens
QSYDSSLTLYV

SEQ ID NO: 4049 - protein, 9 aa, Homo sapiens
MQGTHWPVT

SEQ ID NO: 4050 - protein, 9 aa, Homo sapiens
LQHNSYPLT

SEQ ID NO: 4051 - protein, 9 aa, Homo sapiens
MQGTHWPPT

SEQ ID NO: 4052 - protein, 9 aa, Homo sapiens
QQYYITPYT

SEQ ID NO: 4053 - protein, 11 aa, Homo sapiens
YSTDSSGNLYV

SEQ ID NO: 4054 - protein, 7 aa, Homo sapiens
QQYNSYT

SEQ ID NO: 4055 - protein, 9 aa, Homo sapiens
QQYGSSPGT

SEQ ID NO: 4056 - protein, 10 aa, Homo sapiens
SSYTSISTWV

SEQ ID NO: 4057 - protein, 10 aa, Homo sapiens
QQSYSTLALT

SEQ ID NO: 4058 - protein, 10 aa, Homo sapiens
SSYAGSNNLV

SEQ ID NO: 4059 - protein, 9 aa, Homo sapiens
QQYGSSPGT

SEQ ID NO: 4060 - protein, 9 aa, Homo sapiens
QQYDNLPLT

SEQ ID NO: 4061 - protein, 9 aa, Homo sapiens
QQYDNLPLT

SEQ ID NO: 4062 - protein, 9 aa, Homo sapiens
MQRIEFPLT

SEQ ID NO: 4063 - protein, 11 aa, Homo sapiens
QQRSNWPPTWT

SEQ ID NO: 4064 - protein, 9 aa, Homo sapiens
QQYGSSPWT

SEQ ID NO: 4065 - protein, 9 aa, Homo sapiens
QHYHSFPLT

SEQ ID NO: 4066 - protein, 9 aa, Homo sapiens
QQYGSSPRT

SEQ ID NO: 4067 - protein, 9 aa, Homo sapiens
QQYGSSPRT

SEQ ID NO: 4068 - protein, 9 aa, Homo sapiens
QQYGRSPWT

SEQ ID NO: 4069 - protein, 9 aa, Homo sapiens
QQSYSNPLT

SEQ ID NO: 4070 - protein, 12 aa, Homo sapiens
QSYDSSLSVLYV

SEQ ID NO: 4071 - protein, 10 aa, Homo sapiens
QQYNSWPPLT

SEQ ID NO: 4072 - protein, 8 aa, Homo sapiens
QRRGDGYN

SEQ ID NO: 4073 - protein, 9 aa, Homo sapiens
MQGTEWPRT

SEQ ID NO: 4074 - protein, 9 aa, Homo sapiens
MQGTEWPRT

SEQ ID NO: 4075 - protein, 9 aa, Homo sapiens
QQSYSTPYT

SEQ ID NO: 4076 - protein, 10 aa, Homo sapiens
CSYAGSGTWI

SEQ ID NO: 4077 - protein, 9 aa, Homo sapiens
HQYGSSPWT

SEQ ID NO: 4078 - protein, 8 aa, Homo sapiens
QRRGDGYN

SEQ ID NO: 4079 - protein, 9 aa, Homo sapiens
MQATDWPRT

SEQ ID NO: 4080 - protein, 9 aa, Homo sapiens
MQTTDWPRT

SEQ ID NO: 4081 - protein, 9 aa, Homo sapiens
MQGTEWPRT

SEQ ID NO: 4082 - protein, 9 aa, Homo sapiens
QQFEDLPIT

SEQ ID NO: 4083 - protein, 9 aa, Homo sapiens
QQYYSTPYT

SEQ ID NO: 4084 - protein, 10 aa, Homo sapiens
QQYGTSPVYT

SEQ ID NO: 4085 - protein, 11 aa, Homo sapiens
GTWDFSLSAGV

SEQ ID NO: 4086 - protein, 9 aa, Homo sapiens
MQGTEWPRT

SEQ ID NO: 4087 - protein, 8 aa, Homo sapiens
QQYKSPLS

SEQ ID NO: 4088 - protein, 10 aa, Homo sapiens
QQRSDWHPIT

SEQ ID NO: 4089 - protein, 8 aa, Homo sapiens
QQSYSTPG

SEQ ID NO: 4090 - protein, 11 aa, Homo sapiens
QQRAKWPPRVT

SEQ ID NO: 4091 - protein, 11 aa, Homo sapiens
QQRAKWPPRVI

SEQ ID NO: 4092 - protein, 11 aa, Homo sapiens
YSTDSTANYKV

SEQ ID NO: 4093 - protein, 9 aa, Homo sapiens
MQGTEWPRT

SEQ ID NO: 4094 - protein, 12 aa, Homo sapiens
CSYAGSSAVVVV

SEQ ID NO: 4095 - protein, 9 aa, Homo sapiens
QQYYSTPYT

SEQ ID NO: 4096 - protein, 10 aa, Homo sapiens
LQRSDWHPIT

SEQ ID NO: 4097 - protein, 11 aa, Homo sapiens
QQRSNWPPRLT

SEQ ID NO: 4098 - protein, 8 aa, Homo sapiens
LQYSLATT

SEQ ID NO: 4099 - protein, 10 aa, Homo sapiens
ETWDSNLKGV

SEQ ID NO: 4100 - protein, 10 aa, Homo sapiens
EAWDNNNLGV

SEQ ID NO: 4101 - protein, 9 aa, Homo sapiens
LQHNSYPLT

SEQ ID NO: 4102 - protein, 10 aa, Homo sapiens
MQALQTPGVT

SEQ ID NO: 4103 - protein, 11 aa, Homo sapiens
ATWDDSLNGVV

SEQ ID NO: 4104 - protein, 9 aa, Homo sapiens
MQGTDWPRS

SEQ ID NO: 4105 - protein, 9 aa, Homo sapiens
LHTYTTPRT

SEQ ID NO: 4106 - protein, 10 aa, Homo sapiens
QQYNYWPPLT

SEQ ID NO: 4107 - protein, 9 aa, Homo sapiens
QQSYRFPIT

SEQ ID NO: 4108 - protein, 10 aa, Homo sapiens
QQRTNWPGAT

SEQ ID NO: 4109 - protein, 9 aa, Homo sapiens
HTWGTDIQV

SEQ ID NO: 4110 - protein, 9 aa, Homo sapiens
QSYDSSSQV

SEQ ID NO: 4111 - protein, 10 aa, Homo sapiens
QQYNYWPPLT

SEQ ID NO: 4112 - protein, 9 aa, Homo sapiens
MQGTEWPRT

SEQ ID NO: 4113 - protein, 8 aa, Homo sapiens
QQYNSLYT

SEQ ID NO: 4114 - protein, 10 aa, Homo sapiens
QQYHHWPPYT

SEQ ID NO: 4115 - protein, 10 aa, Homo sapiens
QQYCSTPPYT

SEQ ID NO: 4116 - protein, 9 aa, Homo sapiens
MQGTEWPRT

SEQ ID NO: 4117 - protein, 9 aa, Homo sapiens
MQGTDWPRS

SEQ ID NO: 4118 - protein, 10 aa, Homo sapiens
QQSYSTPLIT

SEQ ID NO: 4119 - protein, 9 aa, Homo sapiens
MQGTEWPRT

SEQ ID NO: 4120 - protein, 9 aa, Homo sapiens
MQGTDWPRT

SEQ ID NO: 4121 - protein, 8 aa, Homo sapiens
QQRFSWYN

SEQ ID NO: 4122 - protein, 11 aa, Homo sapiens
CSYGGRSTSVV

SEQ ID NO: 4123 - protein, 8 aa, Homo sapiens
QQRFSWYN

SEQ ID NO: 4124 - protein, 10 aa, Homo sapiens
SSYTSGGTLV

SEQ ID NO: 4125 - protein, 9 aa, Homo sapiens
MQATEWPRT

SEQ ID NO: 4126 - protein, 9 aa, Homo sapiens
MQGTEWPRT

SEQ ID NO: 4127 - protein, 9 aa, Homo sapiens
MQGTEWPRT

SEQ ID NO: 4128 - protein, 9 aa, Homo sapiens
MQGTDWPRT

SEQ ID NO: 4129 - protein, 9 aa, Homo sapiens
MQGTEWPRT

SEQ ID NO: 4130 - protein, 9 aa, Homo sapiens
MQATEWPRT

SEQ ID NO: 4131 - protein, 11 aa, Homo sapiens
QSADSNDSSPV

SEQ ID NO: 4132 - protein, 9 aa, Homo sapiens
HQRSNWPYT

SEQ ID NO: 4133 - protein, 9 aa, Homo sapiens
QQSYSIPWT

SEQ ID NO: 4134 - protein, 10 aa, Homo sapiens
QHSYSSPPLT

SEQ ID NO: 4135 - protein, 9 aa, Homo sapiens
MQGTDWPRT

SEQ ID NO: 4136 - protein, 9 aa, Homo sapiens
MQTTDWPRT

SEQ ID NO: 4137 - protein, 9 aa, Homo sapiens
MQGTEWPRT

SEQ ID NO: 4138 - protein, 8 aa, Homo sapiens
HQYSGSAT

SEQ ID NO: 4139 - protein, 11 aa, Homo sapiens
ATWDDILNGPV

SEQ ID NO: 4140 - protein, 9 aa, Homo sapiens
QKYNRAPWT

SEQ ID NO: 4141 - protein, 11 aa, Homo sapiens
SSYISDIKLVV

SEQ ID NO: 4142 - protein, 8 aa, Homo sapiens
CSYAGTYI

SEQ ID NO: 4143 - protein, 10 aa, Homo sapiens
CSYRSDNTYI

SEQ ID NO: 4144 - protein, 9 aa, Homo sapiens
MQGTEWPRT

SEQ ID NO: 4145 - protein, 13 aa, Homo sapiens
AAWDDSLNTFRYV

SEQ ID NO: 4146 - protein, 9 aa, Homo sapiens
QQSYNTFFT

SEQ ID NO: 4147 - protein, 9 aa, Homo sapiens
QHYDSYPTA

SEQ ID NO: 4148 - protein, 9 aa, Homo sapiens
MQGTEWLGT

SEQ ID NO: 4149 - protein, 9 aa, Homo sapiens
MQGTEWPRT

SEQ ID NO: 4150 - protein, 9 aa, Homo sapiens
MQTTDWPRT

SEQ ID NO: 4151 - protein, 9 aa, Homo sapiens
QQSYSTPPT

SEQ ID NO: 4152 - protein, 10 aa, Homo sapiens
HQYNKWPPIT

SEQ ID NO: 4153 - protein, 9 aa, Homo sapiens
KQYNSYPYT

SEQ ID NO: 4154 - protein, 9 aa, Homo sapiens
QQSYSDSWT

SEQ ID NO: 4155 - protein, 9 aa, Homo sapiens
MQGTEWPRT

SEQ ID NO: 4156 - protein, 9 aa, Homo sapiens
MQGTDWPRT

SEQ ID NO: 4157 - protein, 9 aa, Homo sapiens
QQYYTTPYT

SEQ ID NO: 4158 - protein, 12 aa, Homo sapiens
QQTYSTPPEGPT

SEQ ID NO: 4159 - protein, 11 aa, Homo sapiens
CSYAGASPFVV

SEQ ID NO: 4160 - protein, 8 aa, Homo sapiens
QQYGSSYT

SEQ ID NO: 4161 - protein, 9 aa, Homo sapiens
MQATEWPRT

SEQ ID NO: 4162 - protein, 9 aa, Homo sapiens
MQTTDWPRT

SEQ ID NO: 4163 - protein, 9 aa, Homo sapiens
MQGTDWPRT

SEQ ID NO: 4164 - protein, 9 aa, Homo sapiens
MQGTEWPRT

SEQ ID NO: 4165 - protein, 10 aa, Homo sapiens
CSYAGDDTVV

SEQ ID NO: 4166 - protein, 9 aa, Homo sapiens
HQYGGSPTT

SEQ ID NO: 4167 - protein, 9 aa, Homo sapiens
MQGTDWPRT

SEQ ID NO: 4168 - protein, 8 aa, Homo sapiens
QQRTSTLT

SEQ ID NO: 4169 - protein, 9 aa, Homo sapiens
MQGTEWPRT

SEQ ID NO: 4170 - protein, 11 aa, Homo sapiens
ETWDSSLSVVV

SEQ ID NO: 4171 - protein, 11 aa, Homo sapiens
GTWDSRLSAVV

SEQ ID NO: 4172 - protein, 9 aa, Homo sapiens
QQRSNWPQN

SEQ ID NO: 4173 - protein, 9 aa, Homo sapiens
QQYDSYPVT

SEQ ID NO: 4174 - protein, 8 aa, Homo sapiens
QQYYTMWT

SEQ ID NO: 4175 - protein, 13 aa, Homo sapiens
GTWDSSLSVDNYV

SEQ ID NO: 4176 - protein, 9 aa, Homo sapiens
MQGTDWPRT

SEQ ID NO: 4177 - protein, 9 aa, Homo sapiens
MQGTEWPRT

SEQ ID NO: 4178 - protein, 9 aa, Homo sapiens
QQSYSTPLT

SEQ ID NO: 4179 - protein, 9 aa, Homo sapiens
QQRSNWPQN

SEQ ID NO: 4180 - protein, 10 aa, Homo sapiens
QSYDSSLSAS

SEQ ID NO: 4181 - protein, 11 aa, Homo sapiens
QSYDSSLSGVL

SEQ ID NO: 4182 - protein, 9 aa, Homo sapiens
MQGTEWPRT

SEQ ID NO: 4183 - protein, 10 aa, Homo sapiens
QQYNTWPPLT

SEQ ID NO: 4184 - protein, 9 aa, Homo sapiens
MQGTHWPRS

SEQ ID NO: 4185 - protein, 10 aa, Homo sapiens
QQYGSAPLYT

SEQ ID NO: 4186 - protein, 9 aa, Homo sapiens
QQYGNSPRT

SEQ ID NO: 4187 - protein, 11 aa, Homo sapiens
ETWDTSLSVVV

SEQ ID NO: 4188 - protein, 9 aa, Homo sapiens
MQGTDWPRT

SEQ ID NO: 4189 - protein, 8 aa, Homo sapiens
LQYSDATT

SEQ ID NO: 4190 - protein, 9 aa, Homo sapiens
QQSYTTPIT

SEQ ID NO: 4191 - protein, 9 aa, Homo sapiens
MQATEWPRT

SEQ ID NO: 4192 - protein, 11 aa, Homo sapiens
QQRRNWPPMYT

SEQ ID NO: 4193 - protein, 9 aa, Homo sapiens
MQTTDWPRT

SEQ ID NO: 4194 - protein, 9 aa, Homo sapiens
MQTTDWPRT

SEQ ID NO: 4195 - protein, 10 aa, Homo sapiens
QSYDSGNLVV

SEQ ID NO: 4196 - protein, 9 aa, Homo sapiens
MQGTEWPRT

SEQ ID NO: 4197 - protein, 9 aa, Homo sapiens
MQGTDWPRT

SEQ ID NO: 4198 - protein, 10 aa, Homo sapiens
QQYGTSPVYT

SEQ ID NO: 4199 - protein, 9 aa, Homo sapiens
MQGTDWPRT

SEQ ID NO: 4200 - protein, 11 aa, Homo sapiens
QQRRNWPPMYT

SEQ ID NO: 4201 - protein, 12 aa, Homo sapiens
QSYDSSLSVLYV

SEQ ID NO: 4202 - protein, 9 aa, Homo sapiens
QHRTNWPYT

SEQ ID NO: 4203 - protein, 10 aa, Homo sapiens
FLSYRGAPPV

SEQ ID NO: 4204 - protein, 9 aa, Homo sapiens
QKHDRDPWT

SEQ ID NO: 4205 - protein, 9 aa, Homo sapiens
MQGTEWPRT

SEQ ID NO: 4206 - protein, 9 aa, Homo sapiens
QQAESFPFT

SEQ ID NO: 4207 - protein, 9 aa, Homo sapiens
MQATDWPRT

SEQ ID NO: 4208 - protein, 8 aa, Homo sapiens
QQRGNGYT

SEQ ID NO: 4209 - protein, 9 aa, Homo sapiens
MQATEWPRT

SEQ ID NO: 4210 - protein, 9 aa, Homo sapiens
MQGTDWPRT

SEQ ID NO: 4211 - protein, 9 aa, Homo sapiens
MQATDWPRT

SEQ ID NO: 4212 - protein, 9 aa, Homo sapiens
QQSYSVPLT

SEQ ID NO: 4213 - protein, 9 aa, Homo sapiens
MQATDWPRT

SEQ ID NO: 4214 - protein, 9 aa, Homo sapiens
STYTSTSTI

SEQ ID NO: 4215 - protein, 9 aa, Homo sapiens
MQGTDWPRT

SEQ ID NO: 4216 - protein, 9 aa, Homo sapiens
MQATDWPRT

SEQ ID NO: 4217 - protein, 9 aa, Homo sapiens
QQTYITPGT

SEQ ID NO: 4218 - protein, 9 aa, Homo sapiens
QQYYLTPWT

SEQ ID NO: 4219 - protein, 10 aa, Homo sapiens
CSYAVSGTVL

SEQ ID NO: 4220 - protein, 8 aa, Homo sapiens
LQYSLATT

SEQ ID NO: 4221 - protein, 8 aa, Homo sapiens
QQRSDGYN

SEQ ID NO: 4222 - protein, 10 aa, Homo sapiens
QQTYITPTWT

SEQ ID NO: 4223 - protein, 9 aa, Homo sapiens
QQSYSTPYN

SEQ ID NO: 4224 - protein, 8 aa, Homo sapiens
QQYNSQYT

SEQ ID NO: 4225 - protein, 10 aa, Homo sapiens
CSSPGTITWV

SEQ ID NO: 4226 - protein, 11 aa, Homo sapiens
ATWDDILNGPV

SEQ ID NO: 4227 - protein, 9 aa, Homo sapiens
MQATHWPRA

SEQ ID NO: 4228 - protein, 9 aa, Homo sapiens
HQYGSSPWT

SEQ ID NO: 4229 - protein, 11 aa, Homo sapiens
QHRSNWPPRYT

SEQ ID NO: 4230 - protein, 11 aa, Homo sapiens
YSTDSTANYKV

SEQ ID NO: 4231 - protein, 11 aa, Homo sapiens
YSTDSTANYKV

SEQ ID NO: 4232 - protein, 11 aa, Homo sapiens
YSTDSTANYKV

SEQ ID NO: 4233 - protein, 9 aa, Homo sapiens
MIWHDNAVV

SEQ ID NO: 4234 - protein, 10 aa, Homo sapiens
HQYNTWPPLT

SEQ ID NO: 4235 - protein, 9 aa, Homo sapiens
MQATHWPRA

SEQ ID NO: 4236 - protein, 9 aa, Homo sapiens
MQSIQVPIT

SEQ ID NO: 4237 - protein, 9 aa, Homo sapiens
QQYNLWPYT

SEQ ID NO: 4238 - protein, 9 aa, Homo sapiens
KQYNSYPYT

SEQ ID NO: 4239 - protein, 11 aa, Homo sapiens
ETWDDSLSAVV

SEQ ID NO: 4240 - protein, 9 aa, Homo sapiens
MQSIQTPIT

SEQ ID NO: 4241 - protein, 9 aa, Homo sapiens
QQYYSTPPT

SEQ ID NO: 4242 - protein, 9 aa, Homo sapiens
MQATEWPRT

SEQ ID NO: 4243 - protein, 10 aa, Homo sapiens
QQYYTTPLFT

SEQ ID NO: 4244 - protein, 9 aa, Homo sapiens
MQGTDWPRT

SEQ ID NO: 4245 - protein, 9 aa, Homo sapiens
MQGTEWPRT

SEQ ID NO: 4246 - protein, 9 aa, Homo sapiens
MQGTEWPRT

SEQ ID NO: 4247 - protein, 9 aa, Homo sapiens
MQGTDWPRT

SEQ ID NO: 4248 - protein, 11 aa, Homo sapiens
SSYTSSSTLYV

SEQ ID NO: 4249 - protein, 8 aa, Homo sapiens
QQYNSGWT

SEQ ID NO: 4250 - protein, 9 aa, Homo sapiens
MQGTDWPRT

SEQ ID NO: 4251 - protein, 8 aa, Homo sapiens
LQLHNYSS

SEQ ID NO: 4252 - protein, 8 aa, Homo sapiens
QQRSDGYN

SEQ ID NO: 4253 - protein, 9 aa, Homo sapiens
SSYTSTNTV

SEQ ID NO: 4254 - protein, 9 aa, Homo sapiens
MQGTDWPRT

SEQ ID NO: 4255 - protein, 8 aa, Homo sapiens
CSSPGTIT

SEQ ID NO: 4256 - protein, 9 aa, Homo sapiens
QQCYSYPPT

SEQ ID NO: 4257 - protein, 9 aa, Homo sapiens
QQYYSTPYT

SEQ ID NO: 4258 - protein, 11 aa, Homo sapiens
CSYTRTNTPVL

SEQ ID NO: 4259 - protein, 10 aa, Homo sapiens
QQYYSWPPLT

SEQ ID NO: 4260 - protein, 9 aa, Homo sapiens
MQGTDWPRT

SEQ ID NO: 4261 - protein, 9 aa, Homo sapiens
MQSTDWPRT

SEQ ID NO: 4262 - protein, 9 aa, Homo sapiens
MQGTEWPRT

SEQ ID NO: 4263 - protein, 10 aa, Homo sapiens
QQYNNWPSLT

SEQ ID NO: 4264 - protein, 9 aa, Homo sapiens
MQATEWPRT

SEQ ID NO: 4265 - protein, 8 aa, Homo sapiens
QQRSDGYN

SEQ ID NO: 4266 - protein, 11 aa, Homo sapiens
YSTDSTANYKV

SEQ ID NO: 4267 - protein, 9 aa, Mus musculus
QQFYNYPRT

SEQ ID NO: 4268 - protein, 7 aa, Mus musculus
QQDYSSP

SEQ ID NO: 4269 - protein, 7 aa, Mus musculus
QQDYSSP

SEQ ID NO: 4270 - protein, 11 aa, Mus musculus
MQHLENPLGVR

SEQ ID NO: 4271 - protein, 7 aa, Mus musculus
LQYHRSP

SEQ ID NO: 4272 - protein, 9 aa, Homo sapiens
QQSYTTPLT

SEQ ID NO: 4273 - protein, 9 aa, Homo sapiens
HQTYTSPYT

SEQ ID NO: 4274 - protein, 10 aa, Homo sapiens
QQYGVSPEII

SEQ ID NO: 4275 - protein, 12 aa, Homo sapiens
QVWDSSSHHHVV

SEQ ID NO: 4276 - protein, 9 aa, Homo sapiens
QQANSFPLT

SEQ ID NO: 4277 - protein, 9 aa, Homo sapiens
QQSYSTPYT

SEQ ID NO: 4278 - protein, 9 aa, Homo sapiens
QQYGSSPLT

SEQ ID NO: 4279 - protein, 9 aa, Homo sapiens
QQFGSSPLT

SEQ ID NO: 4280 - protein, 9 aa, Homo sapiens
LLSYTGARV

SEQ ID NO: 4281 - protein, 9 aa, Homo sapiens
QQANSFPGT

SEQ ID NO: 4282 - protein, 9 aa, Homo sapiens
QQANSFPGT

SEQ ID NO: 4283 - protein, 9 aa, Homo sapiens
QQSYSTLYS

SEQ ID NO: 4284 - protein, 9 aa, Homo sapiens
LQHNTYPFT

SEQ ID NO: 4285 - protein, 9 aa, Homo sapiens
HQYGSSPWT

SEQ ID NO: 4286 - protein, 9 aa, Homo sapiens
QQGNSFPFT

SEQ ID NO: 4287 - protein, 9 aa, Homo sapiens
LQHNTYPFT

SEQ ID NO: 4288 - protein, 9 aa, Homo sapiens
QQGNSFPFT

SEQ ID NO: 4289 - protein, 9 aa, Homo sapiens
LQHNTYPFT

SEQ ID NO: 4290 - protein, 9 aa, Homo sapiens
QHFGTSSVT

SEQ ID NO: 4291 - protein, 9 aa, Homo sapiens
QQYGSSPWT

SEQ ID NO: 4292 - protein, 10 aa, Homo sapiens
SSYAGSNNLV

SEQ ID NO: 4293 - protein, 9 aa, Homo sapiens
MQGTHWPPT

SEQ ID NO: 4294 - protein, 9 aa, Homo sapiens
QQSYSTPPT

SEQ ID NO: 4295 - protein, 9 aa, Homo sapiens
QQYDTYSWT

SEQ ID NO: 4296 - protein, 10 aa, Homo sapiens
QQSYVSPTYT

SEQ ID NO: 4297 - protein, 11 aa, Homo sapiens
QQRSNWPPGCS

SEQ ID NO: 4298 - protein, 8 aa, Homo sapiens
QQHDTSLT

SEQ ID NO: 4299 - protein, 10 aa, Homo sapiens
CSYAGSDTVI

SEQ ID NO: 4300 - protein, 9 aa, Homo sapiens
QSADSSGTV
